(19) United States
(12) Patent Application Publication
(10) Pub. No.: US 2008/0145313 A1
(43) Pub. Date: Jun. 19, 2008

(54) Compositions and Methods for the Treatment and Prevention of Neoplastic Disorders

(75) Inventors: James D. Watson, Auckland (NZ); Elizabeth S. Visser, Auckland (NZ); Jun Hiyama, Auckland (NZ); llkka J. Havukkala, Auckland (NZ); Glen Reid, Auckland (NZ); Annette Lasham, Auckland (NZ)

Correspondence Address: SPECKMAN LAW GROUP PLLC, 1201 THIRD AVENUE, SUITE 330, SEATTLE, WA, 98101, US

(73) Assignee: Genesis Research & Development Corporation Limited, Auckland (NZ)

(21) Appl. No.: 11/847,733

(22) Filed: Aug. 30, 2007

Related U.S. Application Data
(60) Provisional application No. 60/824,047, filed on Aug. 30, 2006.
(60) Provisional application No. 60/841,359, filed on Aug. 30, 2006.
(60) Provisional application No. 60/842,336, filed on Aug. 30, 2006.
(60) Provisional application No. 60/841,733, filed on Aug. 31, 2006.
(60) Provisional application No. 60/910,160, filed on Apr. 4, 2007.
(60) Provisional application No. 60/910,424, filed on Apr. 5, 2007.
(60) Provisional application No. 60/910,436, filed on Apr. 5, 2007.

(51) Int. Cl. A61K 49/00; C07H 21/00; C07H 21/02; A61P 35/00; A61K 31/7052; G01N 33/48

(52) U.S. Cl. 424/9.2; 536/22.1; 536/23.1; 514/44; 436/94

(57) ABSTRACT

Compositions for the treatment and/or prevention of cancer in a mammal by means of RNA interference are provided, together with methods for the use of such compositions. The compositions comprise a small interfering nucleic acid molecule (siNA) that suppresses expression of a target gene that: (a) is involved in an energy metabolism pathway, such as the glycolysis pathway, within a tumor cell; (b) is involved in the biosynthesis of nucleotides, in glycogen metabolism or is an electron carrier that works with ATP to provide metabolic energy; or (c) is involved in transport of sugars, amino acids, and/or water-soluble vitamins, control of intercellular pH, or drug transport within a tumor cell.

### REFERENCE TO RELATED APPLICATIONS

[0001] This application claims priority under 35 U.S.C. §119(e) to U.S. Provisional Patent Applications No. 60/824,047, filed Aug. 30, 2006; No. 60/841,359, filed Aug. 30, 2006; No. 60/842,336, filed Aug. 30, 2006; No. 60/841,733, filed Aug. 31, 2006; No. 60/910,160 filed Apr. 4, 2007; No. 60/910,424 filed Apr. 5, 2007; and No. 60/910,436 filed Apr. 5, 2007.

### FIELD OF THE INVENTION

[0002] The present invention relates to the treatment of disorders such as cancer by means of RNA interference (RNAi). More specifically, the present invention relates to the targeted delivery of small nucleic acid molecules that are capable of mediating RNAi against genes that are active in glucose metabolism pathways, such as the glycolytic pathway, energy metabolism pathways, and/or in transport pathways, such as glucose transporters, equilibrative nucleoside transporters, amino acid transporters, vitamin transporters, and transporters controlling intracellular pH, as well as ion and drug pumps.

### BACKGROUND OF THE INVENTION

[0003] Cancer is a group of diseases characterized by the uncontrolled growth and spread of abnormal cells. Cancer cells evolve from normal cells and acquire traits that enable sustained proliferation, infinite replication, enhanced mobility, and invasiveness, as well as insensitivity to growth inhibition and programmed cell death cues. Such traits are often linked to the over-expression of genes that encode growth and survival promoting proteins.

[0004] Cancer continues to be one of the leading causes of death in the United States and throughout the world. More than half a million people die in the US every year from cancer. Current treatments for cancer include chemotherapy, radiation treatment and/or surgical removal of tumors. There are significant limitations to all these techniques. For example, once a tumor has metastasized, it is almost impossible to surgically remove all cancerous cells. Radiation therapy can damage normal tissue surrounding a tumor, and also may not be sufficient to kill all the cancer cells. Similarly, chemotherapy often causes damage to non-cancerous, as well as cancerous, cells, leading to negative side effects. In addition, treatment of cancer with chemotherapeutic drugs often results in the emergence of drug-resistant cancer cells that no longer respond to chemotherapy. When the drug target is a protein, such as thymidylate synthase, resistance can result from increased expression of the target protein or from a mutation in the protein so that it is no longer a functional drug target. There thus remains a need for improved compositions and methods for the treatment of cancer.

### Energy Metabolism in Cancer Cells

[0005] Normal cells employ two main pathways to generate energy in the form of adenosine triphosphate (ATP), namely oxidative phosphorylation in mitochondria and glycolysis in the cytoplasm. All normal mammalian cells use both these pathways but rely overwhelmingly on oxidative phosphorylation, switching to glycolysis only at times of oxygen deprivation (hypoxia). Glycolysis is the sequence of reactions that converts glucose into pyruvate. In aerobic conditions, pyruvate enters the citric acid cycle (Kreb's cycle) in the mitochondria where it yields acetyl coenzyme A which, in turn, is completely oxidized to CO₂ and H₂O. Under anaerobic conditions, pyruvate is converted to lactate in the cytoplasm. FIG. 1 shows the linear pathway of enzymes involved in glycolysis together with the sites of ATP utilization and generation.

[0006] In most normal mammalian cells, lactate production is suppressed and glycolysis is slowed by environmental oxygen, referred to as the “Pasteur effect”. In 1931 Warburg showed that, in contrast to normal cells, many tumors rely on glycolysis in the presence of oxygen, thereby producing lactate. This is known as the “Warburg effect”, or aerobic glycolysis. It is believed that highly malignant tumors, such as those derived from liver, kidney and brain, may obtain over 50% of their energy via glycolysis. Today, as in the 1930's, biologists question whether a shift in energy production from oxidative phosphorylation to glycolysis is a fundamental property of cancer cells, or a by-product of a normal cell's transformation into a cancer cell.

[0007] In short-term or mild hypoxia, normal cell viability is maintained by changes in the expression of genes for erythropoietin (EPO), the angiogenic vascular endothelial growth factor (VEGF), transferrin receptors and other proteins which collectively allow for the development of a more effective oxygen (and nutrient) supply, thereby allowing the cells to adjust to conditions of low oxygen. Another group of genes involved in the response to hypoxia, namely glycolytic enzymes and glucose transporters, controls glycolysis. However, prolonged and/or severe hypoxia generally leads to cell death due to the activation of apoptotic pathways including the wild-type p53 gene. If the effect of the transcription factor p53 is abolished due to a mutation, a cell becomes resistant to hypoxia-induced apoptosis. Many tumor cells are resistant to triggers that generally lead to cell death, including severe hypoxia.

[0008] In tumors, enhanced cell proliferation and a growing cell mass limits the supply of oxygen by existing blood vessels, leading to hypoxia. Hypoxia became a major field of cancer research when the first hypoxia-inducible transcription factor (HIF-1) was identified in 1991. HIF-1 regulates many genes, including all of the glycolytic enzymes, and is overexpressed in many different types of tumors. HIF-1 can be induced not only by hypoxia, but also by defects in the Akt-1 pathway, even under aerobic conditions, and by various oncogenes. The transcription factor HIF-1 is a heterodimer of two subunits, referred to as HIF-1α and HIF-1β. This heterodimer binds to a short conserved DNA sequence found in the promoters of a number of genes. For example, HIF-1 binds a short conserved DNA sequence at the end of the hexokinase II (HK-II) promoter, thereby activating HK-II expression. HIF-1 belongs to the basic helix-loop-helix (bHLH) superfamily of transcription factors, and also contains an additional auxiliary dimerization site known as the PAS domain. The HLH domain and amino terminus of the PAS domain are required for dimerization, with the basic domain and the carboxy-terminus of PAS being required for DNA binding (Schmid et al., J. Cell. Mol. Med. 8:423-431, 2004).

[0009] HIF-1β (also known as ARNT) is a nuclear protein that is constitutively expressed independently of O₂ tension. In contrast, HIF-1α is a cytoplasmic protein responsive to O₂ levels. A number of splice variants of HIF-1α (have been identified (Mazure et al., Biochem. Pharmacol. 68:971-980, 2004). In well-oxygenated cells, HIF-1α is continuously degraded by the ubiquitin-proteasome system. This degradation process takes place when certain conserved prolyl residues of HIF-1α are hydroxylated, a modification requiring O₂-dependent enzyme activity. Only HIF-1α containing these modified prolyl sites binds to the von Hippel-Lindau protein, which is the recognition component of an E3 ubiquitin ligase that finally targets HIF-1α for proteasomal degradation. Under hypoxic conditions, the hydroxylation and subsequent degradation of HIF-1α is inhibited and HIF-1α subunits translocate to the nucleus where they heterodimerize with HIF-1β subunits. The resultant product is an active HIF-1 protein that binds to specific hypoxic response elements present in target gene promoters, ultimately activating transcription of these genes (see, for example Semenza et al., J. Biol. Chem., 271:32529-32537, 1996). US patent publication no. 20050074430 describes a recombinant virus engineered to contain a hypoxia/HIF-responsive element (HRE), specifically an HRE from EPO or VEGF.

[0010] The protein products of the mutated p53 gene also activate the HIF-1 promoter. In addition, glucose binds an e-box (a glucose-responsive DNA sequence) on the distal end of the HIF-1 promoter, enhancing HK-II production 2-3 fold in the absence of HIF-1.

[0011] In the first step in the glycolytic pathway, glucose enters the cell through specific transport proteins and is phosphorylated by ATP to form glucose-6-phosphate (G6P) in a reaction catalyzed by hexokinases. Four hexokinase isoenzymes have been isolated (known as I, II, III and IV). The expression of these isoenzymes is different between normal and cancer cells, with cancer cells generally having high concentrations of HK-II. HK-II has a much higher affinity for glucose than either glucokinase or HK-IV, the enzyme that phosphorylates glucose in normal cells. The effect of HK-II is modulated by G6P via negative feedback inhibition. However, in hypoxic conditions HK-II binds to the outer membrane of mitochondria via the VDAC receptor as shown in FIG. 2, blocking the feedback activity of G6P, and thus maintaining an increased glycolytic rate. It has been shown that 2-deoxy-D-glucose binds and depletes HK-II, and that 3-bromopyruvate strongly inhibits HK-II, both resulting in cancer cell apoptosis.

[0012] The wild type p53 protein binds to a specific motif on the HK-II gene promoter for transactivation, with a resulting suppression of cellular transformation. Mutant p53 RNA has been shown to form oligomeric complexes with wild-type p53 protein prior to DNA binding, resulting in loss of affinity of wild-type p53 protein for DNA. In addition to this inactivation effect by the mutant p53 RNA, it has been shown that the mutant p53 can promote growth of parental tumor cells (Mathupala et al., J. Biol. Chem. 272:22776-22780, 1997). Katabi et al. have reported that the HK-II promoter is tumor-specific and may be used for gene-targeted therapy because it is differentially expressed and regulated in human cancer cells (Hum. Gene Ther. 10:155-164, 1999). International Patent Publication WO 97/04104 describes the HK-II promoter and indicates that it may be usefully employed in the treatment of diseases including cancer and diabetes.

[0013] In a further step in the glycolytic pathway, G6P is converted to fructose-6-phosphate (F6P) which is then phosphorylated by ATP to give fructose 1,6-biphosphate, a reaction that is catalyzed by 6-phosphofructo-1-kinase (PFK-1), a tetrameric enzyme. Separate genes encode a muscle subunit (M) and a liver subunit (L). PFK from muscle (PFKM) is a homotetramer of M subunits and PFK from liver (PFKL) is a homotetramer of L-subunits. PFK from platelets can be composed of any tetrameric combination of M and L subunits.

[0014] The enzyme 6-phosphofructo-2-kinase (PFK-2; also known as fructose-2,6-biphosphatase) is a bifunctional enzyme that is a critical regulator of glycolysis. When PFK-2 is phosphorylated it is inactive. However, in its non-phosphorylated form, PFK-2 catalyzes the synthesis of fructose-2,6-biphosphate by phosphorylating fructose-6-phosphate. The production of fructose-2,6-biphosphate leads to upregulation of 6-phosphofructokinase-1 (PFK-1), which in turn leads to stimulation of glycolysis and inhibition of the gluconeogenesis pathway.

[0015] There are four PFK-2 isoenzymes in mammals, each encoded by a different gene (referred to as pjkjb1-4) that expresses several isoforms of each isoenzyme. Regulatory sequences have been identified in these genes that account for their long-term control by hormones and tissue-specific transcription factors. The pjkjb3 gene product is constitutively expressed in proliferating tissue, transformed cell lines and in various tumors, being induced by hypoxia. Transcriptional regulation of the pjkjb3 promoter by HIF-1 has been demonstrated (Obach et al., J. Biol. Chem. 279:53562-53570, 2004).

[0016] As discussed above, in the process of aerobic respiration in normal cells, pyruvate is converted to acetyl-coenzyme A, which then enters into the Krebs cycle, providing ATP to the cell. This reaction is catalyzed by the enzyme pyruvate dehydrogenase (PDH), whose activity is under the control of pyruvate dehydrogenase kinases (PDKs). However, under hypoxic conditions, pyruvate is converted to lactate in a reaction catalyzed by lactate dehydrogenase 5 (LDH-5). In cancer cells, pyruvate is transformed to lactate regardless of the presence of oxygen (aerobic glycolysis). This reaction is controlled by the transcription factor HIF-1, which targets the ldh-a gene to produce LDH-5. In contrast to cancer cells, fibroblasts in the tumor supporting stroma exhibit an intense PDH but reduced PDK expression, thereby favoring maximum PDH activity. This means that stroma may use lactic acid produced by tumor cells, preventing the creation of an intolerable intra-tumoral acidic environment at the same time (Koukourakis et al., Neoplasia 7:1-6, 2005).

[0017] The proximal promoter of the gene encoding LDH contains binding sites for carbohydrate-responsive elements (ChoREs) and HIF-1α. LDH, which are tetramers (from peptide chains) of two 35 kDa units, are often up-regulated in tumors. The four peptide chains of LDH consist of two types, each under separate genetic control. The M and H subunits (or peptide chains) are so called because of their predominance in the muscle and heart. Five different isoenzymes (LDH-1-LDH-5) with different biochemical and physiological properties catalyze the same biochemical reaction, but differ in molecular structure and are generally organ specific. The LDH-5 isoenzyme consists of four M-chains and is the product of the ldh-a gene, while LDH-1 consists of four H chains, LDH-2 consists of three H and one M chains, LDH-3 consists of two H and two M chains, and LDH-4 consists of one H and three M chains.

[0018] LDH-5 catalyzes the conversion of pyruvate to lactate under anaerobic oxidation, but this function of LDH gradually fades away as the number of H over M chains increases. The LDH-1 isoenzyme favors aerobic oxidation of pyruvate by pyruvate dehydrogenase. LDH-1 was found to be consistently expressed in all living cells, normal and malignant, epithelial and stromal, including endothelium and lymphocytes. In contrast, LDH-5 was found to be expressed preferentially in tumor cells, while normal tissues were either devoid of LDH-5 or expressed it only faintly, with the cellular population of the tumor-supporting stroma showing LDH-5 activity in a small percentage of cases. LDH-5-positive stromal cells were associated with HIF-1α overexpression (Koukourakis et al., Tumour Biol. 24:199-202, 2003).

[0019] Most of the glucose catabolized by mammalian tissues proceeds down the glycolytic pathway discussed above. However there are other, more minor, metabolic pathways that are taken by glucose, one of which is the pentose phosphate pathway. This pathway generates NADPH and ribose 5-phosphate in the cytosol. NADPH, in contrast to NADH, is used in reductive biosynthesis, with ribose 5-phosphate being used in the synthesis of RNA, DNA and nucleotide coenzymes. The pentose phosphate pathway starts with the dehydrogenation of glucose 6-phosphate (G6P) by glucose 6-phosphate dehydrogenase (G6PDH), also known as hexose 6-phosphate dehydrogenase (H6PDH), to form a lactone, which is hydrolyzed to give 6-phosphogluconate and then oxidatively decarboxylated to yield ribulose 5-phosphate. NADP⁺ is the electron acceptor in both of these oxidations. The last step is the isomerization of ribulose 5-phosphate (a ketose) to ribose 5-phosphate (an aldose). Ribose-5-phosphate, a five carbon sugar, and its derivatives are components of ATP, CoA, NAD⁺, FAD, RNA and DNA.

[0020] There is a fundamental difference between NADPH and NADH. NADH is oxidized by the respiratory chain to yield ATP, whereas NADPH serves as an electron donor in reductive biosynthesis. Imatinib mesylate (ST1571; also known as Gleevec™, Novartis Pharmaceutical Corp., East Hanover, N.J.) and Genistein (4′,5,7-trihydroxy-isoflavone) are both tyrosine kinase inhibitors, which act by targeting HK and G6PDH and inhibiting their use as a substrate for carbons.

[0021] Defects in mitochondrial DNA have been found in many cancers which render the mitochondria respiratory deficient. As a result, in these cells energy production shifts to the glycolytic pathway, with a higher production of reactive oxygen species (ROS). Many tumor cells exhibit increased expression of most of the glycolytic enzymes which is paralleled by a decreased expression of several mitochondrial enzymes. Tumors with high glycolytic rates appear to often have significantly reduced mitochondrial content. Respiratory-deficient mitochondria are resistant to hypoxia-induced apoptosis. Certain mitochondrial proteins are released into the cytosol (for example, cytochrome C, endonuclease G) which decrease the rate of apoptosis in tumor cells and appear to be involved in the development of anticancer drug resistance.

[0022] The oxidative-phosphorylation system of mitochondria consists of a series of five major membrane complexes: NADH-ubiquinone oxidoreductase (commonly known as complex I); succinate-ubiquinone oxidoreductase (complex II); ubiquinol-cytochrome c oxidoreductase (cytochrome bc1 complex or complex III); cytochrome c-O₂ oxidoreductase (complex IV); and F1F0-ATP synthase (complex V). Parts of the respiratory complexes I and III-V are encoded by mitochondrial DNA (mtDNA), with only complex II being exclusively encoded by nuclear DNA (nDNA). The mutation rate in the mitochondrial genome is two orders of magnitude higher than that in the nuclear genome. This is due to: (1) mtDNA being in close vicinity to the electron transport chain with its ability to generate harmful reactive oxygen species (ROS); (2) limited repair capabilities of mitochondria; and (3) missing protection of mtDNA by histones and the chromatin structure.

[0023] Because mtDNA contains no introns, most mitochondrial mutations occur in coding regions. Mitochondrial genomic aberrations have been reported for solid tumors of the breast, colon, stomach, liver, kidney, bladder, lung, head, neck and blood. The generation of ROS in mitochondria, which typically occurs under hypoxic ATP depletion, can be considered a major cause of aberrant mtDNA in most of these tumors. Although the mechanisms of interaction between mtDNA and nDNA are still largely unknown, it has been shown that parts of the mtDNA, including mutated elements, can be incorporated into the nDNA. One of the consequences of such perturbations in the respiratory enzymes is an accumulation of reduced nicotinamide adenine dinucleotide (NADH) in the mitochondria with a subsequent elevation of pyruvate and ultimately lactate in the cytosol.

### Energy Pathways in Cancer Cells

[0024] Living organisms require a continual input of free energy for three major purposes: the synthesis of macromolecules from simple precursors; the active transport of molecules and ions; and the performance of mechanical work, such as muscle contraction. In mammals, this energy is obtained by the oxidation of foodstuffs. Part of the free energy from this process is transformed into a highly accessible form before it is used for the three major purposes described above. The free energy donor in most energy-requiring processes is the nucleotide adenosine triphosphate (ATP). ATP is an energy-rich molecule because its triphosphate moiety contains two phosphoanhydride bonds. A large amount of energy is generated when ATP is hydrolyzed to adenosine diphosphate (ADP) and orthophosphate, or when ATP is hydrolyzed to adenosine monophosphate (AMP) and pyrophosphate.

[0025] Other nucleotides, or nucleotide derivatives, also play pivotal roles in energy metabolism, and in many different biochemical reactions. For example, the nucleotide guanosine 5′-triphosphate (GTP) powers many movements of macromolecules, such as the translocation of nascent peptide chains or ribosomes and the activation of signal-coupling proteins. Adenine nucleotides are structural components of the three major energy process co-enzymes nicotinamide adenine dinucleotide (NAD⁺), flavin adenine dinucleotide (FAD) and coenzyme A (CoA). A common feature of the biosynthesis of NAD⁺, FAD and CoA is the transfer of the AMP moiety to the phosphate group of a phosphorylated intermediate. The resulting pyrophosphate is then hydrolyzed to orthophosphate. Much of the thermodynamic driving force comes from the hydrolysis of the released pyrophosphate. ATP, NAD⁺, FAD⁺ and CoA are not the only key energy generating molecules. However, the inhibition of the formation of ATP, NADH, FADH or acetyl CoA will each, separately, result in cell death.

[0026] Nucleotides are the activated precursors of DNA and RNA, and nucleotide derivatives are activated intermediates in many biosyntheses. For example, UDP-glucose and CDP-diacylglycerol are precursors of glycogen and phosphoglycerides, respectively. S-adenosylmethionine is used to introduce a methyl group in the course of several synthetic pathways. Nucleotides also serve as metabolic regulators. For example, AMP is a ubiquitous mediator of the action of many hormones. Covalent modifications introduced by ATP alter the activities of many enzymes, as exemplified by the phosphorylation of glycogen synthase and the adenylation of glutamine synthetase.

[0027] ATP, ADP and AMP are interconvertible, with the interconversion being catalyzed by the enzyme adenylate kinase in the cytosol and the enzyme adenylate synthase in mitochondria. In humans, seven human adenylate kinase family members have been identified, with some of these family members having a number of isomers. Genetic ablation of adenylate kinase 1 (AK1) disturbs muscle energetic economy and decreases tolerance to metabolic stress, despite rearrangements in alternative high energy phosphoryl transfer pathways (Janssen et al., J. Biol. Chem. 278:12937-12945, 2003).

[0028] In aerobic organisms, while some ATP is generated by the glycolytic pathway as glucose is degraded to produce building blocks for biosynthetic reactions, the major source of ATP is the process called oxidative phosphorylation. Oxidative phosphorylation generates 26 of the 30 molecules of ATP that are formed when glucose is completely oxidized to CO₂ and H₂O.

[0029] The glycolytic pathway is the prelude to both the citric acid cycle and oxidative phosphorylation. The glycolytic pathway degrades glucose to pyruvate in the cytosol. Pyruvate then enters the mitochondria to fuel the citric acid cycle and oxidative phosphorylation. Oxidative phosphorylation is the enzymatic phosphorylation of ADP to form ATP, coupled to electron transport from a substrate to molecular oxygen.

[0030] More specifically, in aerobic organisms free energy is derived from the oxidation of fuel molecules and the transfer of electrons to the ultimate electron acceptor, oxygen (O₂). Electrons are not transferred from fuel molecules directly to O₂, rather they are transferred from fuel molecules to special carriers which are either a pyridine nucleotide, namely NAD⁺, or a flavin, namely FAD. This results in the intermediates NADH and FADH₂, which are reduced forms of pyridine nucleotides and flavins, respectively. These intermediates then transfer their high potential electrons to O₂ by means of an electron transport chain in mitochondria. The proton gradient formed as a result of this flow of electrons drives the synthesis of ATP from ADP and inorganic phosphate (Pi). This process is called oxidative phosphorylation.

[0031] In oxidative phosphorylation, the synthesis of ATP is coupled to the flow of electrons from NADH or FADH₂ to O₂ by a proton gradient across the inner mitochondrial membrane. Electron flow through three asymmetrically oriented transmembrane complexes results in the pumping of protons out of the mitochondrial matrix and the generation of a membrane potential. Electron transport is normally tightly coupled to phosphorylation. NADH and FADH₂ are oxidized only if ADP is simultaneously phosphorylated to ATP. This coupling, called respiratory control, can be disrupted by uncouplers such as 2,4-dinitrophenol (DNP), which dissipate the proton gradient by carrying protons across the inner mitochondrial membrane.

[0032] The electron carriers in the respiratory assembly of the inner mitochondrial membrane are flavins, iron-sulfur complexes, quinones, heme groups of cytochromes, and copper ions. Electrons from NADH are transferred to the flavin mononucleotide (FMN) prosthetic group of NADH-Q reductase, the first of three complexes. This reductase also contains Fe—S centers. NADH-Q reductase is a large enzyme of 880 kDa that consists of at least 34 polypeptide chains. The electrons emerge in Q11₂, the reduced form of ubiquinone (Q). This highly mobile hydrophobic carrier transfers its electrons to cytochrome reductase, a complex that contains cytochromes b and c and an Fe—S center. This second complex reduces cytochrome c, a water-soluble peripheral membrane protein. Cytochrome c, like Q, is a mobile carrier of electrons, which it then transfers to the complex cytochrome oxidase. This third complex contains cytochromes a and a3, and two copper ions. A heme ion and a copper ion in this oxidase transfer electrons to O₂, the ultimate acceptor, to form H₂O. Succinate-Q reductase, in contrast with the other complexes, does not pump protons. NADH-Q reductase, succinate-Q reductase, cytochrome reductase, and cytochrome oxidase are also called Complex I, II, III, and IV, respectively.

[0033] The flow of electrons through each of these complexes leads to the pumping of protons from the matrix side to the cytosolic side of the inner mitochondrial membrane. A proton-motive force, consisting of a pH gradient (cytosolic side acidic) and a membrane potential (cytosolic side positive), is generated. The flow of protons back to the matrix side through ATP synthase drives ATP synthesis. The enzyme complex ATP synthase consists of a hydrophobic F₀ unit that conducts protons through the membrane and a hydrophilic F₁ unit that catalyzes ATP synthesis sequentially at three sites. Protons flowing through ATP synthase release tightly bound ATP.

[0034] ATP and ADP do not diffuse freely across the inner mitochondrial membrane. Rather, a specific transport protein, ATP-ADP translocase (also called the adenine nucleotide carrier), enables these charged molecules to traverse this permeability barrier. The flows of ATP and ADP are coupled: ADP enters the mitochondrial matrix only if ATP exits, and vice versa. This reaction is catalyzed by a translocase. The enzyme ATP-ADP translocase, a dimer of identical 30 kDa subunits, contains a single nucleotide binding site that alternately faces the matrix and cytosolic sides of the membrane. ATP and ADP (both devoid of Mg²⁺) are bound with nearly the same affinity. In the presence of a positive membrane potential, the rate of binding-site release from the matrix to the cytosolic side is more rapid for ATP than for ADP because ATP has one more negative charge. Hence, ATP is transported out of the matrix about 30 times more rapidly than is ADP, which leads to a higher phosphoryl potential on the outer side than on the matrix side. The translocase does not evert at an appreciable rate unless a nucleotide is bound. This assures that the entry of ADP into the matrix is precisely coupled to the exit of ATP. On the other hand, the membrane potential is decreased by the exchange of ATP for ADP, which results in a net transfer of one negative charge out of the matrix. ATP-ADP exchange is energetically expensive; about a quarter of the energy yield from electron transfer by the respiratory chain is consumed to regenerate the membrane potential that is tapped by this exchange process.

[0035] The translocase is highly abundant, constituting about 14% of the inner mitochondrial membrane protein. It is specifically inhibited by very low concentrations of atractyloside, a plant glycoside, or of bongkrekic acid, an antibiotic from a mold. Atractyloside binds to the translocase when its nucleotide site faces outward, whereas bongkrekic acid binds when this site faces the matrix. Oxidative phosphorylation stops soon after either inhibitor is added, showing that the ATP-ADP translocase is essential for this process.

[0036] In the synthesis of purine nucleotides, the purine ring is assembled from a variety of precursors: glutamine, glycine, aspartate, methylenetetrahydrofolate, N¹⁰-formyl-tetrahydrofolate and CO₂. The committed step in the de novo synthesis of purine nucleotides is the formation of 5-phosphoribosylamine from 5-phosphoribosyl-1-pyrophosphate (PRPP) and glutamine, which is catalyzed by amido-phosphoribosyltransferase. PRPP is synthesized from ATP and ribose 5-phosphate in a reaction catalyzed by PRPP synthetase. The purine ring is assembled on ribose phosphate. The addition of glycine, followed by formylation, amination and ring closure, yields 5-aminoimidazole ribonucleotide. This intermediate contains the completed five-membered ring of the purine skeleton. The addition of CO₂, the nitrogen atom of aspartate and a formyl group, followed by ring closure, yields inosine monophosphate (IMP), a purine ribonucleotide. IMP dehydrogenase 2 (IMPDH2) is the rate-limiting enzyme of de novo GTP biosynthesis and catalyzes the NAD-dependent oxidation of inosine-5′-monophosphate into xanthine-5′-monophosphate, which is then converted into guanosine-5′-monophosphate.

[0037] AMP and guanosine 5′-monophosphate (GMP) are formed from IMP. Purine ribonucleotides can also be synthesized by a salvage pathway in which a preformed base reacts directly with PRPP.

[0038] In the synthesis of pyrimidine nucleotides, the pyrimidine ring is assembled first and then linked to ribose phosphate to form a pyrimidine nucleotide, in contrast with the sequence in the de novo synthesis of purine nucleotides. PRPP is again the donor of the ribose phosphate moiety. In the first step, carbamoyl phosphate is formed in an ATP-dependent reaction catalyzed by the enzyme carbamoyl phosphate synthetase. The synthesis of the pyrimidine ring starts with the formation of carbamoylaspartate from carbamoyl phosphate and aspartate, a reaction catalyzed by aspartate transcarbamoylase. Dehydration, and cyclization, which is catalyzed by dihydroorotase, is followed by oxidation which yields orotate, which in turn reacts with PRPP to give orotidylate. Decarboxylation of this pyrimidine nucleotide yields uridine 5′-monophosphate (UMP). CTP synthetase (CTPS) catalyzes the amination of UTP, the last step in CTP biosynthesis, to give cytidine 5′-triphosphate (CTP). The first three enzymes involved in this process, carbamoyl phosphate synthetase, aspartate transcarbamoylase and dihydroorotase, are covalently joined in a single 240 kDa polypeptide chain called CAD.

[0039] The bifunctional enzyme uridine monophosphate synthase (uridine 5′-phosphate synthase; UMPS) catalyzes the last two steps in de novo pyrimidine biosynthesis. UMPS contains two sequential catalytic activities for the synthesis of orotidine 5′-phosphate (OMP) from orotate (orotate phosphoribosyltransferase or orotidine-5′-phosphate:pyrophosphate phosphoribosyltransferase (OPRT)) and the decarboxylation of OMP to form UMP (OMP decarboxylase or orotidine-5′-phosphate carboxy-lyase) (Traut, Arch. Biochem Biophys. 268:108-115, 1989; Suttle et al., Proc. Natl. Acad. Sci. USA 185:1754-1758. 1988).

[0040] Deoxyribonucleotides, the precursors of DNA, are formed by the reduction of ribonucleoside diphosphates in the de novo synthesis pathway. These conversions are catalyzed by ribonucleotide reductase. This enzyme consists of two subunits, B₁ (RRM1, a 172 kDa dimer) and B₂ (RRM2, an 87 kDa dimer). The reduction of ribonucleotides to deoxyribonucleotides is precisely controlled by allosteric interactions of these two subunits. Electrons are transferred from NADPH to sulfhydryl groups at the active sites of this enzyme by thioredoxin or glutaredoxin. A tyrosyl free radical that is generated by an iron center in the reductase participates in catalyzing the exchange of H for OH at C-2 of the sugar unit. dTMP is formed by methylation of dUMP, which is catalyzed by thymidylate synthetase. Inhibition of thymidylate synthetase stops DNA production, arresting the cell cycle and eventually leading to “thymineless” cell death. The methylation of dUMP is the reaction that is targeted by the cancer drug 5-fluorouracil. 5-Fluorouracil is an analog of dUMP and irreversibly inhibits thymidylate synthetase after acting as a normal substrate. High levels of thymidylate synthetase have been correlated with poor prognosis in patients with colorectal, breast, cervical, bladder, kidney and non-small cell lung cancers. Thymidylate synthetase also exhibits oncogene-like activity, suggesting a link between thymidylate synthetase-regulated DNA synthesis and the induction of a neoplastic phenotype (Rahman et al., Cancer Cell 5:301-302, 2004). Schmitz et al. (Cancer Research 64:1431-1435, 2004) have demonstrated that siRNA molecules can be used to inhibit thymidylate synthetase expression, and suggested that such molecules may have therapeutic potential either alone or as chemosensitizers in combination with thymidylate synthetase inhibitor compounds.

[0041] Deoxyribonucleotides can also be synthesized via phosphorylation of deoxyribonucleosides by deoxyribonucleoside kinases in the salvage pathway (Reichard, Annu. Rev. Biochem. 57:349-374, 1998). There are four distinct human deoxyribonucleoside kinases. Deoxycytidine kinase (dCK), deoxyguanosine kinase (dGUOK), and thymidine kinase 2 (TK2) are constitutively expressed throughout the cell cycle and are closely related members of the enzyme family, while thymidine kinase 1 (TK1) is not sequence-related to the other enzymes and is strictly S-phase-regulated (Amer and Eriksson, Pharmacol Ther. 67:155-186, 1995). Deoxycytidine kinase (dCK) catalyzes the rate-limiting step of the deoxynucleoside salvage pathway in mammalian cells and plays a key role in the activation of several pharmacologically important nucleoside analogs. dCK also phosphorylates clinically important anticancer and antiviral nucleoside analogs in addition to deoxycytidine, deoxyadenosine, and deoxyguanosine (Johansson et al., Proc. Natl. Acad. Sci. USA 94:11941-11945, 1997). The nucleoside analogs phosphorylated by dCK include 1-β-D-arabinofuranosylcytosine (araC), 9-β-D-arabinofuranosyladenine, and 2-chloro-2′-deoxyadenosine (CdA), which are commonly used in the treatment of hematological malignancies (Tallman and Hakimian, Blood 86:2463-2474, 1995), and 2′,2′-difluorodeoxycytidine (dFdC), which is active against several solid malignant tumors (Hui and Reitz, Am. J. Health-Syst. Pharm. 54:162-170, 1997).

[0042] DGUOK and TK2 are mitochondrial deoxyribonucleoside kinases. DGUOK phosphorylates purine deoxyribonucleosides in the mitochondrial matrix and TK2 phosphorylates deoxythymidine, deoxycytidine, and deoxyuridine. In addition, DGUOK and TK2 phosphorylate several nucleoside analogs in vitro (Wang et al., J. Biol. Chem. 268:22847-22852, 1993; Munch-Petersen et al., J. Biol. Chem. 266:9032-9038, 1991).

[0043] Thymidine kinase 1 (TK1) phosphorylates only deoxythymidine and deoxyuridine, and is strictly cell-cycle-regulated. TK1 activity is low or absent in resting cells, starts to occur in late G₁ cells, increases in S phase (coinciding with the increase in DNA synthesis), and disappears during mitosis (Welin et al., Proc. Natl. Acad. Sci. USA 101: 17970-17975, 2004).

[0044] The one-carbon and electron donor in the conversion of dUMP to dTMP is tetrahydrofolate, which is converted into dihydrofolate. Tetrahydrofolate is subsequently regenerated by the reduction of dihydrofolate by NADPH. Dihydrofolate reductase, which catalyzes the conversion of tetrahydrofolate to dihydrofolate, is inhibited by dihydrofolate analogs, such as the cancer drugs aminopterin and methotrexate. Mammalian tumor cells can become resistant to methotrexate. Methotrexate interferes with DNA synthesis and repair, and cellular replication, resulting in fewer tetrahydrofolate derivatives in the cell so that purine synthesis is blocked.

[0045] In humans, purines are degraded to urate. Gout, a disease that affects joints and leads to arthritis, is associated with excessive production of urate. Allopurinol, a suicide inhibitor of xanthine oxidase, is used to treat gout. This analog of hypoxanthine blocks the formation of urate from hypoxanthine and xanthine. Lesch-Nyhan syndrome, a genetic disease characterized by self-mutilation, mental deficiency and gout, is caused by the absence of hypoxanthine-guanine phosphoribosyl transferase. This enzyme is essential for the synthesis of purine nucleotides by the salvage pathway.

[0046] The first step in the synthesis of nicotinamide adenine dinucleotide (NAD⁺) is the formation of nicotinate ribonucleotide from nicotinate and PRPP. Nicotinate (also called niacin) is derived from tryptophan. Humans can synthesize the required amount of nicotinate if the supply of tryptophan in the diet is adequate. However, an exogenous supply of nicotinate is required if the dietary intake of tryptophan is low. A dietary deficiency of tryptophan and nicotinate can lead to Pellagra, a disease characterized by dermatitis, diarrhea and dementia.

[0047] Following the formation of nicotinate ribonucleotide, an AMP moiety is transferred from ATP to nicotinate ribonucleotide to form desamido-NAD⁺. The final step is the transfer of the amide group of glutamine to the nicotinate carboxyl group to form NAD⁺. NADP⁺ is then derived from NAD⁺ by phosphorylation of the 2′-hydroxyl group of the adenine ribose moiety. This transfer of a phosphoryl group from ATP is catalyzed by NAD⁺ kinase.

[0048] Flavin adenine dinucleotide (FAD) is synthesized from riboflavin and two molecules of ATP. First riboflavin is phosphorylated by ATP to give riboflavin 5-phosphate (also called flavin mononucleotide). FAD is then formed by the transfer of an AMP moiety from a second molecule of ATP to riboflavin 5′-phosphate.

[0049] The AMP moiety of coenzyme A also comes from ATP. A common feature of the biosyntheses of NAD⁺, FAD and CoA is the transfer of the AMP moiety of ATP to the phosphate group of a phosphorylated intermediate. The pyrophosphate formed in these condensations is then hydrolyzed to orthophosphate. As in many other biosyntheses, much of the thermodynamic driving force comes from the hydrolysis of the released pyrophosphate.

[0050] In mammalian cells, fatty acids represent a major form of stored energy. Excess dietary carbohydrate is converted to fatty acid and stored in adipose tissue as triglyceride, together with excess dietary fat. The enzyme responsible for the conversion of carbohydrates into fatty acids is fatty acid synthase (FASN). FASN functions as a homodimer consisting of seven distinct catalytic centers arranged around a central acyl carrier protein. Its main function is to catalyze the synthesis of palmitate from acetyl-CoA and malonyl-CoA, in the presence of NADPH, into long-chain saturated fatty acids.

[0051] ATP citrate-lyase (ACLY) is the primary enzyme responsible for the synthesis of cytosolic acetyl-CoA in many tissues and has a central role in de novo lipid synthesis. The enzyme is a 40 kDa tetramer of identical subunits and catalyzes the formation of acetyl-CoA and oxaloacetate from citrate and CoA with a concomitant hydrolysis of ATP to ADP and phosphate. The product, acetyl-CoA, serves several important biosynthetic pathways, including lipogenesis and cholesterogenesis. In nervous tissue, ATP citrate-lyase may be involved in the biosynthesis of acetylcholine. Two transcript variants encoding distinct isoforms have been identified for this gene.

### Role of Transporters in Cancer

[0052] Normal cells employ a number of transport systems in a range of important cellular functions. The transporters provide nutrients, remove unwanted materials, establish electrochemical gradients across membranes, and affect entry and extrusion of drugs into and from cells (Lee, Eur. J. Pharm. Sci. 11 (Suppl. 2):S41-50, 2000; FIG. 3). The main characteristics that distinguish cancer cells from normal cells are their unfettered growth, and an increased and altered metabolism (Fuchs and Bode, Semin. Cancer Biol. 15:254-266, 2005). To support this increase in growth and metabolism, tumor cells absorb large quantities of nutrients from their surroundings. In addition to glucose and other energy sources, tumor cells are also voracious in their consumption of amino acids, nucleosides and water-soluble vitamins.

[0053] The cellular import of these solutes is mediated by the solute carrier (SLC) superfamily, a group of over 300 proteins transporting a large variety of nutrients, including organic nutrients, inorganic ions, drugs and their metabolites (Hediger, Eur. J. Physiol. 447:465-468, 2004). A number of SLC proteins have been shown to play a role in cancer cell biology. SLC proteins are involved in provision of essential nutrients, mediation of the uptake of antimetabolite drugs and modulation of cellular physiology. As a result, a number of reports have shown that SLC transporters influence the chemoresistance and chemosensitivity of cells to anticancer drugs (see FIG. 3). For example, expression of the reduced folate carrier (RFC or SLC19A1) correlates with methotrexate resistance (Ganaphthy, Eur. J. Physiol. 447:641-646, 2004), and loss of uptake mediated by RFC is a well-known mechanism of MTX resistance. Likewise, the fact that the well-known ENT (SLC29) family of facilitative nucleoside transporters correlate with sensitivity to nucleoside analogue drugs, fits with their ability to transport both normal nucleosides and their analogues into cells. In fact, small molecule inhibitors of nucleoside transport have been tested as chemosensitizers but, although effective in vitro, clinical trials have been unsuccessful. These proteins, for which there are as yet no effective drug treatments, represent ideal targets for RNAi-based therapeutics.

[0054] In contrast to the examples above, some transporters correlate with drug sensitivity/resistance profiles in more unexpected ways; for example, expression of a mitochondrial amino acid transporter and a number of ion pumps are associated with resistance to platinum drugs (Huang, Cancer Res. 64:4294-4301, 2004).

[0055] Amino acid transporters also modulate chemoresistance/sensitivity in cancer cells. ASCT2, a glutamine transporter, is expressed in all tumor cells and is necessary for the growth of cell lines in culture, implicating a role for this transporter in the immortalization process (Fuchs and Bode, Sem. Cancer Biol. 15:254-266, 2005). Another amino acid transporter, xCT (SLC7A11), modulates chemoresistance by controlling the uptake of cysteine and thereby intracellular levels of reduced glutathione, an important component of phase II metabolism (Huang, Cancer Res. 64:4294-4301, 2004). It has been demonstrated that siRNA-mediated knockdown of this transporter affected drug potencies similarly to small molecule transport inhibitors (Huang, Cancer Res. 65:7446-7454, 2005).

[0056] In addition to numerous solute carriers, tumor cells also express ATP-dependent pumps, several of which limit the accumulation of anticancer drugs inside cells—so-called classical multidrug resistance (MDR; see FIG. 3). This phenomenon is characterized by the emergence of cells resistant to multiple structurally and functionally unrelated drugs following exposure to a single agent, and is associated with the upregulation of drug pumps in the cytoplasmic membrane. In one of the first uses of RNAi in cancer biology, MDR was successfully reversed using siRNAs targeting MDR1, the major determinant of clinical MDR (Wu, Cancer Res. 63:1515-1519, 2003).

### RNA Interference

[0057] The treatment methods disclosed herein utilize the process of RNA interference (RNAi). RNAi is a post-transcriptional RNA silencing phenomenon used by most eukaryotic organisms as a defense mechanism against viral attack and transposable factors. This RNA silencing process was first identified in plants, where it is referred to as post-transcriptional gene silencing (PTGS), and was subsequently observed in the nematode C. elegans by Fire et al. (Nature 391:806-811, 1998). RNAi involves the use of small interfering nucleic acid or RNA molecules (siRNAs) that selectively bind with complementary mRNA sequences, targeting them for degradation and thus inhibiting corresponding protein production. More recently it has been shown that siRNAs can induce de novo methylation and silencing of promoter sequences, known as transcriptional gene silencing (TGS).

[0058] More specifically, in an initiation step double-stranded RNA (dsRNA) is digested by the enzyme Dicer (a member of the RNase III family of dsRNA-specific ribonucleases) into small interfering RNAs (siRNAs) of 19-25 nucleotides in length. Each siRNA consists of two separate, annealed single strands of nucleotides. Each strand may have a 2-3 nucleotide 3′ overhang. In the effector step, siRNA duplexes bind to a nuclease complex to form an RNA-induced silencing complex (RISC). The RISC then targets the endogenous mRNA complementary to the siRNA within the complex, and cleaves the endogenous mRNA approximately twelve nucleotides from the 3′ terminus of the siRNA. Degradation of the endogenous mRNA is then completed by exonucleases. An amplification step may also exist within the RNAi pathway in some organisms, for example by copying of the input dsRNAs or by replication of the siRNAs themselves.

[0059] Transfection of long dsRNA molecules of greater than 30 nucleotides into most mammalian cells causes nonspecific suppression of gene expression, as opposed to the gene-specific suppression seen in non-mammalian organisms. This is believed to be due to activation of an antiviral defense mechanism that includes the production of interferon, and that leads to a global shut-down of protein production. However it has been shown that this pathway is not activated by dsRNAs less than 30 nucleotides in length, and that short dsRNAs of 21-23 nucleotides can be used to reduce specific gene expression in mammalian cells (Caplen et al., Proc. Natl. Acad. Sci. USA 17:9742-9747, 2001; Elbashir et al., Nature 6836:494-498, 2001). Brummelkamp et al. have demonstrated that siRNAs targeting oncogenes are effective in reducing tumors in mice (Cancer Cell 2:243-247, 2002).

[0060] RNAi has several advantages over other gene silencing techniques, such as the use of antisense oligonucleotides (ODN). RNAi techniques result in more specific inhibition of gene expression than ODN and are able to induce the same level of silencing as ODN at much lower concentrations of reagent. Also, siRNAs are more resistant to nuclease degradation than ODN. Bertrand et al. (Biochem. Biophys. Res. Commun. 296:1000-1004, 2002) have shown that, in mice, siRNA silencing is more effective than antisense suppression.

[0061] It has been shown that sequence specificity of siRNA is important, as single base pair mismatches between the siRNA and its target mRNA can dramatically reduce silencing. Accordingly, in order to be effective in suppressing expression of a gene of interest to a high degree, siRNAs must be designed so that they are specific to the target gene. In addition, in order to avoid unwanted side effects, a delivery system must be employed that specifically delivers the siRNA to the desired target. Delivery of siRNA to cells by means of exogenous delivery of preformed siRNAs or via promoter-based expression of siRNAs or shRNAs has been described. Genetic constructs for the delivery of siRNA molecules are described, for example, in U.S. Pat. No. 6,573,099. The delivery of short RNA fragments to cells in vivo in mammals can be problematic due to the rapid degradation of the RNA. Short hairpin RNAs (shRNA) are nucleic acid molecules that mimic the structure of the RNAi duplex and that can be produced in cells following delivery of expression vectors encoding the shRNA. The use of shRNA expression plasmids to reduce gene expression in vivo in rats has been described by Zhang et al. (J. Gene Med. 5:1039-1045, 2003).

[0062] International patent publication no. WO 2005/032486 describes an adenovirus vector that encodes an siRNA directed against the HIF-1α gene and its use to inhibit tumor growth in a mouse model. Yu et al. have described studies employing RNA interference targeted against HIF-1α mRNA to evaluate the role of HIF-1α in apoptosis in primary cultured human endothelial cells (Lab. Invest. 84:553-561, 2004).

### SUMMARY OF THE INVENTION

[0063] Briefly stated, the present invention provides compositions for the treatment and/or prevention of a cancer in a mammal by means of RNA interference, together with methods for the use of such compositions. The cellular targets for siNA employed in the compositions are: genes that encode enzymes involved in the metabolism of glucose, more specifically in the glycolysis pathway; genes that encode specific enzymes involved in the biosynthesis of nucleotides or in glycogen metabolism; genes that encode electron carriers that work with ATP to provide metabolic energy; and/or genes that encode proteins involved in the transport of amino acids, peptides, sugars, monocarboxylic acids, organic cations, phosphates, nucleosides and/or water-soluble vitamins.

[0064] The disclosed compositions comprise at least one small interfering nucleic acid molecule (siNA) that suppresses expression of a target gene within a target cell. In one embodiment, the disclosed compositions comprise: (a) a binding agent that specifically binds to a target internalizable cell surface molecule, or antigen, that is expressed on the surface of a target cell of interest, and (b) a nucleic acid binding component, normally a cationic polymer or cationic lipid, to condense and protect the siNA, and (c) at least one siNA that suppresses expression of a target gene within the target cell, whereby, after binding to the target cell surface molecule, the binding agent and siNA are internalized into the cell, and the siNA released. In one embodiment, the composition comprises a cationic lipid or cationic polymer covalently linked to a folic acid molecule to target the folate receptor on cancer cells.

[0065] In related embodiments, the disclosed compositions comprise: (a) a binding agent that specifically binds to a target internalizable cell surface molecule, or antigen, that is expressed on the surface of a target cell of interest; and (b) a genetic construct that is capable of expressing at least one siNA that suppresses expression of a target gene within the target cell, whereby, after binding to the target cell surface molecule, the binding agent and genetic construct are internalized into the cell, and the siNA is expressed by the genetic construct. In a further aspect, the compositions comprise a genetic construct that is capable of expressing a siNA that suppresses expression of a target gene within the target cell, wherein the genetic construct is packaged within a viral vector which, upon infection of the cell, releases its genetic material enabling expression of the genetic construct. Preferably the viral vector is an adenovirus-associated vector (AAV). In this aspect, viral capsid proteins may act as a binding agent.

[0066] In certain embodiments, compositions are provided that comprise a genetic construct that expresses a siNA, wherein expression of the siNA is under the control of a promoter or promoter region that is specific to the target cell, so that suppression of gene expression in non-target cells is reduced. For example, promoters that drive the expression of HIF-1 or HK-II, or promoter regions containing response elements that are involved in regulating transcription of HIF-1 or HK-II, may be employed to prevent expression of the siNA in non-tumor cells. Other promoters that may be effectively employed in the disclosed genetic constructs include those for c-erbB-2 (also known as HER-2/neu), prostate-specific antigen (PSA), osteocalin, clusterin, EIA (human adenovirus type 5 early region 1A) and survivin. Alternatively, the siNA may be under the control of an RNA polymerase III or a tissue-specific RNA polymerase II promoter.

[0067] In certain embodiments, the binding agent employed in the compositions is an antibody, or an antigen-binding fragment thereof. Other binding agents that may be effectively employed in the inventive compositions include cell-specific ligands, and peptides or small molecules that specifically bind to cell-specific receptors. Viral (capsid) proteins may also be employed as binding agents.

[0068] In one embodiment, the binding agent is linked to the siNA, genetic construct or viral vector by means of a streptavidin-biotin linker as described below. In another embodiment, the siNA, genetic construct or viral vector is complexed to a lipid carrier, such as a cationic or anionic lipid carrier, which in turn is linked to the binding agent. In a related embodiment, the siNA, genetic construct or viral vector is encapsulated within a liposome, and the binding agent, or the antigen-binding portion thereof, is present on the surface of the liposome.

[0069] In certain of the disclosed compositions, the target cell surface molecule is an internalizable molecule that is expressed on the surface of a tumor cell, wherein binding of a complex to the cell surface molecule leads to internalization of the complex within the tumor cell. In certain embodiments the target cell surface molecule is selected from the group consisting of the receptors for: transferrin; endothelin I; and VEGF, including the VEGF165b isomer.

[0070] The compositions disclosed herein are effective in reducing expression of at least one gene that is involved in the development and/or progression of a cancer, Examples of such genes include: genes that are active in an energy metabolism pathway, biosynthesis of nucleotides or in glycogen metabolism; genes that encode electron carriers that work with ATP to provide metabolic energy; and genes that encode proteins involved in the transport of amino acids, peptides, sugars, monocarboxylic acids, organic cations, phosphates, nucleosides and/or water-soluble vitamins. In certain embodiments, the siNA employed in the compositions is capable of suppressing production of HIF-1 (preferably HIF-1α and/or HIF-β, or a splice variant thereof); HK-II; LDH-5; G6P dehydrogenase; Pfkfb3; PFKL; 5-phosphoribosyl-1-pyrophosphate synthetase (PRPS); amido-phosphoribosyltransferase (PPAT); carbamoyl phosphate synthetase 1 (CPS1); carbamoyl phosphate synthetase 2 (CAD); ribonucleotide reductase subunit 1 (RRM1); ribonucleotide reductase subunit 2 (RRM2); ribonucleotide reductase subunit 2B (RRM2B); thymidylate synthetase (TYMS); dihydrofolate reductase (DHFR); adenylate kinase (AK1); NAD synthase (NADSYN); flavin adenine dinucleotide synthase (FLAD1); NADH-Q reductase (NADHQ); cytochrome reductase (UQCRC2); cytochrome oxidase (COX5a); ATP synthase (ATP5B); fatty acid synthase (FASN); ATP citrate lyase (ACLY); ATP-ADP translocase 1 to 3 (ANT1, ANT2, ANT3); CTP synthase (CTPS); inosine monophosphate dehydrogenase 2 (IMPDH2); deoxycytidine kinase (DCK); thymidine kinase 1 (TK1); thymidine kinase 2 (TK2); deoxyguanosine kinse (DGUOK); uridine monophosphate synthetase (UMPS); or dihydropyrimidine dehydrogenase (DPYD).

[0071] Examples of siNAs that are capable of suppressing expression of HIF-1α, HIF-β, HK-II, LDH-5, G6P dehydrogenase, PFKL or Pfkfb3 include the siRNA sequences corresponding to the target sequences provided in SEQ ID NO: 1 to 15 and 17. Examples of siNAs that are capable of suppressing expression of PRPP synthetase, amido-phosphoribosyltransferase (PPAT), CPS1, CAD, ribonucleotide reductase subunits 1 and 2, ribonucleotide reductase subunit 2B (RRM2B), thymidylate synthetase, dihydrofolate reductase, adenylate kinase, NADSYN, FAD synthase, NADH-Q reductase, cytochrome reductase, cytochrome oxidase, ATP synthase, FASN, ACLY, or ATP-ADP translocases 1 to 3, CTPS, IMPDH2, deoxycytidine kinase (DCK), thymidine kinase 1 (TK1), thymidine kinase 2 (TK2), deoxyguanosine kinse (DGUOK), uridine monophosphate synthetase (UMPS) and dihydropyrimidine dehydrogenase (DPYD) include the siRNA sequences corresponding to the target sequences provided in SEQ ID NO: 18-47.

[0072] In an alternative embodiment, the siNA employed in the disclosed compositions is targeted against the promoters for HIF-1α, HIF-β, HK-II, LDH-5, G6P dehydrogenase, PFKL, Pfkfb3, PRPP synthetase, amido-phosphoribosyltransferase (PPAT), CPS1, CAD, ribonucleotide reductase subunits 1 and 2, ribonucleotide reductase subunit 2B (RRM2B), thymidylate synthetase, dihydrofolate reductase, adenylate kinase, NADSYN, FLAD1, NADH-Q reductase, cytochrome reductase, cytochrome oxidase, ATP synthase, FASN, ACLY, ANT1, ANT2, ANT3, CTPS, IMPDH2, deoxycytidine kinase (DCK), thymidine kinase 1 (TK1), thymidine kinase 2 (TK2), deoxyguanosine kinse (DGUOK), uridine monophosphate synthetase (UMPS) or dihydropyrimidine dehydrogenase (DPYD) whereby introduction of the genetic construct into a target cell, such as a tumor cell, will lead to transcriptional gene silencing of the HIF-1α, HIF-β, HK-II, LDH-5, G6P dehydrogenase, PFKL, Pfkfb3, PRPP synthetase, PPAT, CPS1, CAD, ribonucleotide reductase subunits 1 and 2, ribonucleotide reductase subunit 2B (RRM2B), thymidylate synthetase, dihydrofolate reductase, adenylate kinase, NADSYN, FLAD1, NADH-Q reductase, cytochrome reductase, cytochrome oxidase, ATP synthase, FASN, ACLY, ANT1, ANT2, ANT3, CTPS, IMPDH2, DCK, TK1, TK2, DGUOK, UMPS or DPYD genes in the target cell.

[0073] In certain embodiments, the compositions disclosed herein are effective in reducing expression of a gene that is active in transport of metabolites involved in the development and/or progression of a cancer. In one aspect, the siNA employed in such compositions are capable of suppressing production of one or more transporters in the SLC2A subfamily of glucose transporters. The glucose transporter genes are expressed by every living cell, mediating the facilitative uptake of glucose down its concentration gradient. The inwardly directed glucose gradient is maintained by the rapid metabolism of glucose once inside the cell, effectively limiting free intracellular glucose. The SLC2A subfamily of glucose transporters consists of 13 members (Uldry and Thorens, Eur. J. Physiol. 447:480-489, 2004), which fall into three classes: Class I contains the glucose transporters GLUT1, GLUT2, GLUT 3 and GLUT4; Class II comprises the fructose transporter GLUT5 and the recently described GLUT7, GLUT9 and GLUT11; and Class III consists of GLUT6, GLUT 8, GLUT 10 and GLUT 12 plus HMIT (Joost, Am. J. Physiol. Endocrinol. Metab. 282:E974-E976, 2002).

[0074] GLUT1, together with GLUT3 and GLUT4 which are present in most tissues, has the highest affinity for glucose, and is believed to be responsible for basal glucose uptake (Macheda et al., J. Cell Physiol. 202:654-662, 2005). GLUT1 and GLUT3 are upregulated during transformation, and the level of expression in tumors correlates with decreased survival (Macheda et al., J. Cell Physiol. 202:654-662, 2005). In addition, GLUT3 and GLUT5 are expressed in tumor cells but not the normal cells from which the tumor derives (Macheda et al., J. Cell Physiol. 202:654-662, 2005). As a fructose transporter, GLUT5 is believed to provide the breast cancer cells in which it is overexpressed with an alternative energy source (Zamora-Leon et al., Proc. Natl. Acad. Sci. USA 93:1847-1852, 1996). Of the more recently identified glucose transporters, GLUT12 is widely expressed in embryonic tissues as well as many cancers, but not adult tissues (Rogers et al., Cancer Lett. 193:225-233, 2003). Evidence for the importance of these transporters in cancer comes from studies of their regulation: GLUT1 and GLUT3 are up-regulated in hypoxia; GLUT1 and 4 are negatively regulated by p53; and GLUT12 expression is under the control of estrogens (Macheda et al., J. Cell Physiol. 202:654-662, 2005). Studies with GLUT1-targeting antisense have shown that reducing GLUT1 expression reduces tumor cell growth.

[0075] Table 1 lists the SLC2A subfamily members that have been shown to be up-regulated in cancer cells (Macheda et al., J. Cell Physiol. 202:654-662, 2005).

TABLE 1
SLC2A subfamily members up-regulated in cancer cells

| | | DNA SEQ | | | |
|---|---|---|---|---|---|
| Gene | Protein | ID NO: | Substrates | Tissue distribution | Accession |
| SLC2A1 | GLUT1 | 48 | Glucose, | Erythrocytes, brain, | NM_006516 |
| | | | Galactose, Mannose, | blood brain barrier, | |
| | | | glucosamine | blood-tissue barrier | |
| SLC2A3 | GLUT3 | 49 | Glucose, | Brain (neurons), | NM_006931 |
| | | | Galactose, | testis | |
| | | | Mannose, | | |
| | | | Xylose | | |
| SLC2A5 | GLUT5 | 50 | Fructose | Small intestine, | NM_003039 |
| | | | | kidney | |
| SLC2A12 | GLUT12 | 51 | Glucose | Heart, prostate, | NM_145176 |
| | | | | skeletal muscle | |

[0076] In a further aspect, the siNA employed in the compositions disclosed herein are capable of suppressing production of one or more transporters in the SLC28 and SLC29A subfamilies of equilibrative nucleoside transporters. Examples of these transporters are listed in Table 2. All cells express proteins involved in uptake of nucleosides. These proteins are sodium-independent equilibrative nucleoside transporters (ENTs), encoded by the SLC29A gene subfamily (Baldwin et al., Eur. J. Physiol. 447:735-743, 2004), and the sodium-dependent concentrative nucleoside transporters (CNTs), encoded by the SLC28A gene subfamily (Gray et al., Eur. J. Physiol. 447:728-734, 2004). These equilibrative nucleoside transporter proteins provide cells with the raw materials for nucleic acid synthesis, as even in cells able to synthesize nucleosides de novo, salvage requires much less energy. The transporters in these two gene families also mediate the uptake of the nucleoside analogue drugs used in chemotherapy. The SLC29A subfamily members have a wider expression profile, whereas the SLC28A subfamily members are expressed at highest levels in epithelial tissues with lower levels at other sites (Gray et al., Eur. J. Physiol. 447:728-734, 2004). Of the four ENTs, the ubiquitously expressed genes encoding ENT1 and ENT2 are the best characterized. These two transporters mediate uptake of both purine and pyrimidine nucleosides containing either ribose or deoxyribose sugar moieties, and in addition, ENT2 also transports nucleobases (Baldwin et al., Eur. J. Physiol. 447:735-743, 2004). As mentioned above, these transporters are able to mediate uptake of analogue drugs (Damaraju, Oncogene 22:7524-7536, 2003), and have shown that loss of expression of SLC29A1 correlates with resistance to nucleoside analogue drugs.

TABLE 2
Nucleoside transporters in cancer cells

| | | DNA | | | |
|---|---|---|---|---|---|
| | | SEQ ID | | | |
| Gene | Protein | NO: | Substrates | Tissue distribution | Accession |
| SLC29A1 | ENT1 | 52 | Purine and | Ubiquitous, plasma | NM_004955 |
| | | | pyrimidine | membrane | |
| | | | nucleosides | (basolateral in | |
| | | | | polarised renal | |
| | | | | epithelial cells) and | |
| | | | | perinuclear | |
| | | | | membranes | |
| SLC29A2 | ENT2 | 53 | Purine and | Ubiquitous, plasma | NM_001532 |
| | | | pyrimidine | membrane | |
| | | | nucleosides | (basolateral in | |
| | | | and nucleobases | polarised renal | |
| | | | | epithelial cells). | |
| | | | | Particularly abundant | |
| | | | | in skeletal muscle | |
| SLC29A3 | ENT3 | 54 | Purine and | Widely distributed, | NM_018344 |
| | | | pyrimidine | possibly intracellular | |
| | | | nucleosides | | |
| | | | and some | | |
| | | | nucleobases | | |
| SLC29A4 | ENT4 | 55 | Adenosine | Widely distributed | NM_153247 |
| SLC28A1 | CNT1 | 56 | Pyrimidines, | Liver, kidney, small | NM_004213 |
| | | | adenosine | intestine | |
| SLC28A2 | CNT2 | 57 | Purines, | Widely distributed | NM_004212 |
| | | | uridine | | |
| SLC28A3 | CNT3 | 58 | Purines and | Widely distributed | NM_022127 |
| | | | pyrimidines | | |

[0077] In a further aspect, the siNA employed in the compositions disclosed herein are capable of suppressing production of one or more transporters in the SLC1A, SLC3A, SLC7A, SLC38A and SLC43A subfamilies of amino acid transporters, listed in Table 3. Tumor cells use amino acids for nucleotide, glutathione, amino sugar and protein synthesis, as well as energy production, but consume far more than required to support their growth; leading to negative nitrogen balance in the host (Fuchs and Bode, Sem. Cancer Biol. 15:254-266, 2005). Tumor cells enhance and alter channeling of amino acids to certain pathways, often in concert with the switch to aerobic glycolysis, and are especially dependent on glutamine and arginine for growth and survival (Fuchs and Bode, Sem. Cancer Biol. 15:254-266, 2005). Dedicated amino acid transporters are categorized into several families based on functional attributes. For example, the SLC1A5 (encoding ASCT2), and SLC7A5 (encoding LAT1), obligate exchangers with broad substrate specificity for a number of amino acids, that are upregulated in cancer. Of the high-affinity ASCT2 substrates, glutamine is the most important for cancer cells, whereas LAT1 mediates the import of essential amino acids (Fuchs and Bode, Sem. Cancer Biol. 15:254-266, 2005). LAT1 and ASCT2 both exhibit oncofetal expression patterns: they are overexpressed in cancers but not normal tissue. Inhibition of ASCT2-mediated glutamine uptake, either by inhibition with other ASCT2 substrates or by using an antisense construct, has been shown to slow tumor cell growth (Fuchs et al., Am. J. Physiol. Gastrointest. Liver Physiol. 286:G467-G478, 2004). The SNATs and ATB^{0,+}, from the SLC6A and SLC38A gene families, contribute to cancer cell metabolism by providing exchange partners for glutamine uptake, or by mediating arginine uptake (Gupta, Biophys Biochem Acta 1741:215-223, 2005). A further transporter xCT (encoded by SLC7A11) has also been shown recently to modulate chemosensitivity, by controlling cystine uptake in exchange for glutamate (Huang et al., Cancer Res. 65:7446-7454, 2005). Both LAT1 and xCT form homodimers with 4F2hc, encoded by SLC3A2 (Palacin and Kanai, Eur. J. Physiol. 447:490-494, 2004). This protein is up-regulated on a wide range of tumors and correlates with metastatic potential. In addition to its role in amino acid uptake, contributes to cellular transformation through its signaling function (Palacin and Kanai, Eur. J. Physiol. 447:490-494, 2004).

TABLE 3
Amino acid transporters genes in cancer cells

| | | DNA | | | |
|---|---|---|---|---|---|
| | | SEQ ID | | Tissue | |
| Gene | Protein | NO: | Substrates | distribution | Accession |
| SLC1A4 | ASCT1 | 59 | L-Ala, L-Ser, | Widespread | NM_003038 |
| | | | L-Cys | | |
| SLC1A5 | ASCT2 | 60 | L-Ala, L-Ser, | Lung, skeletal | NM_005628 |
| | | | L-Thr, L-Cys, | muscle, large | |
| | | | L-Gln | intestine, kidney, | |
| | | | | testis, adipose | |
| | | | | tissue | |
| SLC3A2 | 4F2hc, CD98 | 61 | Amino acid | Ubiquitous. In | NM_002394 |
| | | | transport | epithelial cells, | |
| | | | systems L, | basolateral | |
| | | | y + L, xc- and | plasma | |
| | | | asc with light | membrane. | |
| | | | subunits | | |
| | | | SLC7A5-8 | | |
| | | | and | | |
| | | | SLC7A10-11 | | |
| SLC6A14 | ATB^{0,+} | 62 | Arginine | Lung, trachea, | NM_007231 |
| | | | | salivary gland, | |
| | | | | mammary gland, | |
| | | | | stomach, | |
| | | | | pituitary. | |
| SLC7A5 | LAT1 | 63 | Large neutral | Brain, ovary, | NM_003486 |
| | [assoc. | | L-amino | testis, placenta, | |
| | with | | acids, T3, T4, | blood-brain | |
| | 4F2hc] | | L-dopa, BCH | barrier, fetal liver, | |
| | | | (system L) | activated | |
| | | | | lymphocytes, | |
| | | | | tumor cells; lower | |
| | | | | expression in | |
| | | | | many other | |
| | | | | tissues/plasma | |
| | | | | membrane | |
| SLC7A11 | xCT | 64 | Cysteine | Macrophages, | NM_014331 |
| | [assoc. | | (anionic), L- | brain, retinal | |
| | with | | glutamate | pigment cells, | |
| | 4F2hc] | | (system xc-) | liver, kidney/ | |
| | | | | basolateral in | |
| | | | | epithelial cells | |
| SLC43A1 | LAT3 | 65 | Glutamine, | Pancreas and liver | NM_003627 |
| | | | asparagine, | | |
| | | | histidine, | | |
| | | | serine | | |
| SLC38A4 | SNAT3 | 66 | Glutamine, | Brain, liver, | NM_018018 |
| | | | histidine | kidney | |
| SLC38A5 | SNAT5 | 67 | Glutamine, | Stomach, brain, | NM_033518 |
| | | | asparagine, | liver, lung, small | |
| | | | histidine, | intestine, spleen, | |
| | | | serine | colon, kidney | |

[0078] In a further aspect, the siNA employed in the compositions disclosed herein are capable of suppressing production of one or more transporters in the SLC5A, SLC19A and SLC23A subfamilies of vitamin transporters (listed in Table 4 below). Vitamins are essential co-factors that cannot be synthesized de novo in cells, and must be absorbed from dietary sources by enterocytes, and subsequently transported to cells. In the case of water-soluble vitamins, uptake is a carrier-mediated process. Biotin, folate, vitamin C (ascorbic acid) and members of the vitamin B complex (thiamine, riboflavin, niacin, pryridoxine) all require transporters to enter cells (Said, Annu. Rev. Physiol. 66:419-446, 2004). Folate transport is carried out by the ubiquitously expressed RFC (encoded by SLC19A1). RFC expression is regulated in some tissues by folate levels (Ganaphthy et al., Eur. J. Physiol. 447:641-646, 2004). RFC also transports methotrexate and other antifolates, and mutations conferring resistance to this class of therapeutic have been characterized (Ganaphthy et al., Eur. J. Physiol. 447:641-646, 2004). Two closely related transporters, ThTr1 and ThTr2, encoded by SLC19A subfamily members, mediate thiamine uptake and are expressed ubiquitously (Ganaphthy et al., Eur. J. Physiol. 447:641-646, 2004). Vitamin C is taken up SVCT1 and SVCT2, encoded by members of the SLC23 subfamily (Takanaga et al., Eur. J. Physiol. 447:677-682, 2004). These proteins provide cells with L-ascorbic acid, which cannot synthesized from glucose in humans due to the lack of the enzyme gulonolactone oxidase (Wilson, Annu. Rev. Nutr. 25:105-125, 2005). SVCT1 is primarily expressed in epithelial tissue and is responsible for the uptake of dietary vitamin C, whereas SVCT2 is expressed ubiquitously (Wilson, Annu. Rev. Nutr. 25:105-125, 2005). The essential nature of these compounds for multiple cellular processes makes inhibiting their uptake an attractive target in cancer cells.

TABLE 4
Vitamin transporter genes expressed in cancer cells

| | | DNA SEQ ID | | | |
|---|---|---|---|---|---|
| Gene | Protein | NO: | Substrates | Tissue distribution | Accession |
| SLC5A6 | SMVT1 | 68 | Biotin, lipoate | Brain, heart, kidney, | NM_021095 |
| | | | and panthothenate | lung and placenta. | |
| | | | | Plasma membranes. | |
| SLC19A1 | RFT, | 69 | N5-methyl- | Ubiquitous/Plasma | NM_003056 |
| | RFC | | tetra | membrane, also in | |
| | | | hydrofolate | mitochondrial | |
| | | | | membrane | |
| SLC19A2 | ThTr1 | 70 | Thiamine | Ubiquitous/Plasma | NM_006996 |
| | | | | membrane | |
| SLC19A3 | ThTr2 | 71 | Thiamine, | Ubiquitous/Plasma | NM_025243 |
| | | | biotin | membrane | |
| SLC23A1 | SVCT1 | 72 | L-Ascorbic | Epithelium of | NM_005847 |
| | | | acid | kidney, intestines, | |
| | | | | liver, ovary, prostate | |
| | | | | and thymus, and B- | |
| | | | | lymphocytes. | |
| SLC23A2 | SVCT2 | 73 | L-Ascorbic | Widespread | NM_005116 |
| | | | acid | including brain | |
| | | | | (neurons), retina, | |
| | | | | placenta, spleen, | |
| | | | | prostate, testis, | |
| | | | | ovary. | |

[0079] In a further aspect, the siNA employed in the compositions disclosed herein are capable of suppressing production of one or more mitochondrial transporters (listed in Table 5 below). Mitochondria contain a family of related carrier proteins that mediate transport of metabolites ranging from protons to ATP across the mitochondrial inner membrane. The citrate carrier (CIC/SLC25A1) mediates transport of tricarboxylates, especially citrate, from the mitochondria to the cytosol, and is required for fatty acid and steroid synthesis; the former is elevated in cancer cells (Palmieri, Pflug. Arch. 447:689-709, 2004). The dicarboxylate transporter (DIC/SLC25A10) transports dicarboxylates such as malate or succinate across the mitochondrial inner membrane. Although the primary role of this transporter is to direct Krebs cycle intermediates into the mitochondria, it is also involved in gluconeogenesis including the conversion of amino acids to energy substrates (Palmieri, Pflug. Arch. 447:689-709, 2004).

TABLE 5
Mitochondrial carriers involved in cancer cell metabolism

| | | DNA | | Tissue | |
|---|---|---|---|---|---|
| Gene | Protein | SEQ ID NO: | Substrates | distribution | Accession |
| SLC25A1 | CIC | 74 | Di- and | Liver, kidney, | NM_005984 |
| | | | tricarboxylates | pancreas (also in | |
| | | | | brain, lung, | |
| | | | | heart)/inner | |
| | | | | mitochondrial | |
| | | | | membrane | |
| SLC25A10 | DIC | 75 | Di- and | Liver, kidney, | NM_012140 |
| | | | tricarboxylates | heart, brain, | |
| | | | | lung, pancreas/ | |
| | | | | inner | |
| | | | | mitochondrial | |
| | | | | membrane | |

[0080] In a further aspect, the siNA employed in the compositions disclosed herein are capable of suppressing production of one or more transporters in the SLC9A and SLC16A subfamilies involved in controlling intracellular pH (see Table 6 below). In tumor cells, intracellular pH changes during transformation (Cardone et al., Nat. Rev. Cancer 5:786-795, 2005). Both in vitro and in vivo tumor cells have elevated pHi with a lowered extracellular interstitium pH (Cardone et al., Nat. Rev. Cancer 5:786-795, 2005). This reverse pH gradient across the cell membrane increases with tumor progression. Maintenance of this gradient is due to cellular extrusion of protons, which increases with tumor aggressiveness. The NHE1, MCT1 and HCO3—/Cl— exchangers have been shown to be involved in the maintenance of the gradient. Initial transformation steps activate NHE1 thereby increasing pHi, and in transformed cells, an increased affinity of the allosteric proton binding site hyperactivates NHE1, further increasing intracellular pH (pHi) and stimulating aerobic glycolysis. This produces lactate which is extruded by MCT1, further reducing pHi and reversing the cellular pH gradient across the membrane. NHE1 activity also has a fundamental role in controlling glycolysis: stable transfection of ion translocation deficient NHE1 into fibroblasts leads to reduced expression of 6 glycolytic enzymes. NHE1 is activated by low serum, extracelular pH (pHe) and hypoxia, as well as the interaction between hyaluronan and CD44. These factors, together with increased glycolysis, form a feedback loop for tumor progression (Cardone et al., Nat. Rev. Cancer 5:786-795, 2005). Acidification of the microenvironment also stimulates MMP activation. NHE1 small molecule inhibitors have been tested in phase II and III trials. Inhibition of NHE1 is attractive as NHE1 activity is high in tumors and low in normal tissues. Furthermore, AS-ODN targeting NHE1, either alone or in combination with MCT-1, decreased both the growth of A549 cells in vitro and their ability to cause tumors in mice (Zhang et al., Ai Zheng 21:719-723, 2002).

TABLE 6
Genes involved in the regulation of pH in cancer cells

| | | DNA | | | |
|---|---|---|---|---|---|
| Gene | Protein | SEQ ID NO: | Substrates | Tissue distribution | Accession |
| SLC9A1 | NHE1 | 76 | Sodium/proton | Ubiquitous | NM_003047 |
| | | | exchanger | (upregulated in | |
| | | | | cancer) | |
| SLC16A1 | MCT1 | 77 | Lactate and | Ubiquitous | NM_003051 |
| | | | other | (upregulated in | |
| | | | carboxylates | cancer) | |

[0081] In a further aspect, the siNA employed in the compositions disclosed herein are capable of suppressing production of one or more transport ATPases. These proteins are sub-classified as P, V, F or ABC ATPases (Pedersen, J. Bioenerg. Biomembr. 37:349-357, 2005). P-type ATPases are characterized by the formation of an aspartyl phosphate intermediate during the reaction cycle and include the well-known Na⁺/K⁺ ATPase, as well as pumps mediating transport of calcium and heavy metals; V-type ATPases are commonly found in the membranes of vacuoles and other organelles, into which they pump protons; F-type ATPases are named for their role in the F₀F₁ ATP synthase; and ABC transporters are named after their ATP-binding cassette, and are responsible for the transport of drugs, xenobiotics, lipids and lipid derivatives against their concentration gradient (Pedersen, J. Bioenerg. Biomembr. 37:349-357, 2005).

[0082] P-type ATPases include the plasma membrane Ca²⁺ ATPases PMCA1 (ATP2B1), PMCA2 (ATP2B2), PMCA3 (ATP2B3) and PMCA4 (ATP2B4) (see Table 7 below). Plasma membrane Ca²⁺ ATPases play an important role in regulation of intracellular free Ca²⁺ concentrations required for regulation of Ca²⁺-mediated signaling and other biological processes. Together with Na⁺/Ca²⁺ exchangers, PCMAs are the major plasma membrane transport system responsible for the long-term regulation of the resting intracellular Ca²⁺ concentration (Strehler and Zacharias, Physiol. Rev. 81:21-50, 2001). Studies have shown that aberrant PCMA expression is associated with cancer in several different tissues. Different isoforms of PMCAs are expressed in breast cancer cell lines (Lee et al., Cell Signal. 14:1015-1022, 2002), and PMCA1 is down-regulated in oral cancer (Saito et al., Oncol. Rep. 15:49-55, 2006). The ATP7A and ATP7B transporters mediate the transport of Cu²⁺ and other heavy metals. ATP7B is found predominantly in the liver, kidney and placenta (Komatsu et al., Cancer Res. 60:1312-1316, 2000). ATP7B confers cisplatin resistance when transfected into cells (Komatsu et al., Cancer Res. 60:1312-1316, 2000), and is a marker for cisplatin resistance in solid tumors (Katoh et al., Ann. Thorac. Cardiovasc. Surg. 11:143-145, 2005). ATP7A is expressed at very low (or undetectable) levels in most normal tissues, but is readily found in many common tumor types and is associated with poor prognosis in ovarian cancer patients undergoing platinum-based drug treatments (Samimi et al., Clin. Cancer Res. 9:5853-5859, 2003).

[0083] V-type H⁺ ATPase is an ATP-driven enzyme that transforms the energy of ATP hydrolysis to electrochemical potential differences of protons across diverse biological membranes via the primary active transport of H⁺. In turn, the transmembrane electrochemical potential of H⁺ is used to drive a variety of (i) secondary active transport systems via H⁺-dependent symporters and antiporters and (ii) channel-mediated transport systems (Beyenbach and Wieczorak, J. Exp. Biol. 209:577-589, 2006). An intact V-type H⁺ ATPase is required for the normal function of the Golgi complex, endoplasmic reticulum, vacuoles and endocytotic and exocytotic vesicles. Numerous physiological processes depend on the activity of V-ATPases, and V-ATPases are implicated as a contributing factor in multiple diseases, including osteoporosis, deafness, and cancer (Bowman and Bowman, J. Bioenerg. Biomembr. 37:431-435, 2005). Some human tumor cells are characterized by an increased V-type H⁺-ATPase expression and activity (De Milito and Fais, Future Oncol. 1:779-786, 2005) and V-ATPases are known to be involved in multidrug resistance (Sennoune et al., Cell Biochem. Biophys. 40:185-206, 2004).

[0084] ABC transporters are a large family comprising 49 members in humans. The first member of this family to be linked with cancer was MDR1 (ABCB1). The product of this gene, P-glycoprotein, uses the energy from ATP hydrolysis to extrude natural product cancer drugs from cells, and its overexpression leads to the phenomenon of multidrug resistance (Borst and Oude-Elferink, Ann. Rev. Biochem. 71:537-592, 2002). It is believed that one way this overexpression occurs is via transcriptional activation controlled by the Y-box binding protein, YBX1 (Bargou et al., Nat. Med. 3:447-450, 1997). Indeed, it has been shown that cells with reduced YBX1 show greater sensitivity to chemotherapeutic compounds (Ohga et al., Cancer Res. 56:4224-4228, 1996). YBX1 (p47) is targeted for specific endoproteolytic cleavage by the 20S proteasome that removes the C-terminal 105 amino-acid residues containing a cytoplasmic retention signal (CRS) (Sorokin et al., EMBO J. 24:1-11, 2005). The resulting N-terminal polypeptide (p37) accumulates in the nuclei of cells exposed to DNA-damaging drugs.

[0085] Subsequent to the identification of MDR1, many related genes were identified, including the multidrug-resistance associated (MRP or ABCC) subfamily. Of these, ABCC4 and ABCC5 mediate transport of, among other substrates, nucleoside analog drugs in monophosphate form (Borst and Oude-Elferink, Ann. Rev. Biochem. 71:537-592, 2002), and by contributing to the distribution of these compounds play a role in the relative resistance of cells to these drugs.

TABLE 7
Transport ATPases, ABC transporters and Y-box binding protein involved
in cancer cell physiology

| | | DNA | | Tissue | |
|---|---|---|---|---|---|
| Gene | Protein | SEQ ID NO: | Substrates | distribution | Accession |
| ATP2B1 | PMCA1 | 78 | Ca²⁺ | Ubiquitous in | NM_001001323 |
| | | | | adult tissue | |
| ATP2B2 | PMCA2 | 79 | Ca²⁺ | Nervous | NM_001683 |
| | | | | system, muscles | |
| ATP2B3 | PMCA3 | 80 | Ca²⁺ | Nervous | NM_021949 |
| | | | | system, muscles | |
| ATP2B4 | PMCA4 | 81 | Ca²⁺ | Ubiquitous in | NM_001684 |
| | | | | adult tissue | |
| ATP6V1A | | 82 | H⁺ | Ubiquitous | NM_001690 |
| ATP6V1B2 | | 83 | H⁺ | Ubiquitous | NM_001693 |
| ATP6V1C1 | | 84 | H⁺ | Ubiquitous | NM_001007254 |
| ATP6V1E1 | | 85 | H⁺ | Ubiquitous | NM_001696 |
| ATP6V1F | | 86 | H⁺ | Ubiquitous | NM_004231 |
| ATP7A | | 87 | Heavy | Ubiquitous (not | NM_004047 |
| | | | metals | liver) | |
| ATP7B | | 88 | Heavy | Liver, kidney, | NM_000053 |
| | | | metals | placenta | |
| ABCB1 | MDR1 | 89 | Drugs | Ubiquitous | NM_000927.3 |
| ABCC4 | MRP4 | 90 | Nucleotides | Ubiquitous | NM_005845 |
| ABCC5 | MRP5 | 91 | Nucleotides | Ubiquitous | NM_005688 |
| YBX1 | YBX1 | 92 | | Ubiquitous | NM_004559 |

[0086] In an alternative embodiment, the siNA employed in the compositions disclosed herein are targeted against the promoters for the SLC family members, whereby introduction of the genetic construct into a target cell, such as a tumor cell, will lead to transcriptional gene silencing of the genes in the target cell.

[0087] In a related aspect, methods are provided for the treatment and/or prevention of a cancer in a patient, comprising administering to the patient a composition disclosed herein. Cancers that may be treated using such methods include, but are not limited to, primary and metastatic tumors and carcinomas of the breast; colon; rectum; lung; oropharynx; hypopharynx; esophagus; stomach; pancreas; liver; gallbladder; bile ducts; small intestine; kidney; bladder; urothelium; cervix; uterus; ovaries; prostate; seminal vesicles; testes; endocrine glands, including thyroid, adrenal and pituitary; skin, including melanomas, sarcomas and Kaposi's sarcoma; tumors of the brain, nerves, eyes and meninges including astrocytomas, gliomas, glioblastomas, retinoblastomas, neuromas, neuroblastomas; and solid tumors arising from hematopoietic malignancies such as leukemias, head and neck cancer, myelomas and lymphomas.

[0088] The compositions disclosed herein may include more than one siNA directed against one or more specific cancers. The compositions may be employed alone or in conjunction with known therapeutic methods and compositions currently employed in the treatment of cancer. In a preferred embodiment, the compositions comprising an siNA targeted against a specific target gene that expresses a target protein are employed in conjunction with a known chemotherapeutic directed against the target protein. For example, cancer cells treated with the drugs 2-deoxy-D-glucose and 3-bromopyruvate (both of which target HK-II), and that become drug resistant will still be susceptible to killing using siNA directed against HK-II. The use of siNAs in combination with drugs that target the same cellular protein in a cancer cell may thus have benefits to a patient in terms of reducing the amounts of drugs required and in combating the emergence of drug-resistant cancer cells. In certain embodiments, the disclosed compositions comprise at least one siNA directed against a cancer in combination with at least one known chemotherapeutic agent. Within related embodiments, combination therapeutic regimens for the treatment of disease are provided, such therapeutic regimens comprising the simultaneous and/or sequential administration of one or more siRNA composition(s) in combination with at least one known chemotherapeutic modality.

[0089] For example, cancer cells treated with the drug 5-fluorouracil (which targets thymidylate synthase), and that become drug resistant will still be susceptible to killing using siNA directed against thymidylate synthase. The use of siNAs in combination with drugs that target the same cellular protein in a cancer cell may thus have benefits to a patient in terms of reducing the amounts of drugs required and in combating the emergence of drug-resistant cancer cells. Other examples of known cancer therapeutic drugs which may be beneficially employed with the disclosed compositions include, but are not limited to: Xeloda® (capecitabine), Paclitaxel™, and FUDR (fluorouridine), all of which target thymidylate synthase; Fludara® (fludarabine phosphate) and Gemzar® (gemcitabine), both of which target ribonucleotide reductase; methotrexate, which targets both thymidylate synthase and dihydrofolate reductase; and cytarabine, which is incorporated into DNA. In certain embodiments, the compositions disclosed herein comprise at least one siNA directed against a cancer in combination with at least one known chemotherapeutic agent.

[0090] In yet other embodiments, the present invention provides systems and methods for the rapid identification of potentially therapeutic small inhibitory RNA (siRNA) molecules, comparison of those siRNA molecules with existing molecules having known in vivo efficacy, and the targeted delivery of those efficacious siRNA into cells associated with a disease phenotype. Such siRNA molecules are capable of mediating RNAi against genes that are active in key pathways involved in disorders, such as, for example, cancers and inflammatory and allergic diseases.

[0091] These and other aspects of the present invention will become apparent upon reference to the following detailed description. All references disclosed herein are hereby incorporated by reference in their entirety as if each was incorporated individually.

### BRIEF DESCRIPTION OF THE FIGURES

[0092] FIG. 1 shows the linear pathway of enzymes involved in glycolysis together with the sites of ATP utilization and generation

[0093] FIG. 2 shows the effect of HK-II binding to the outer membrane of mitochondria via the VDAC receptor.

[0094] FIG. 3 depicts proteins involved in transport of molecules across cellular membranes. SLC transporters are represented by circles, whereas pumps are rhomboid in shape with ATP use signified; gene families are numbered without SLC for clarity. Substrates are in bold, co-substrates or exchange partners are in normal font. MCA: monocarboxylic acid; TCA: tricarboxylic acid.

[0095] FIG. 4 presents a diagrammatic representation of systems and methods for the identification of siRNA suitable for use in combination therapeutic regimens.

[0096] FIG. 5 shows an exemplary RNAi vector of the present invention.

[0097] FIG. 6 shows the inhibition of cell growth following transfection of A549 cells with a Stealth™ siRNA duplex targeting the human thymidylate synthetase gene (TYMS).

[0098] FIGS. 7A-F show growth inhibition by Stealth™ siRNAs targeting ribonucleotide reductase subunits 1 (RRM1; FIG. 7A-C) and 2 (RRM2; FIG. 7D-F) in A549 (FIGS. 7A and D), SK-MeI-5 (FIGS. 7B and E) and MCF-7 (FIGS. 7C and F) cancer cell lines following transfection with 10 nM of three independent siRNAs. Cells were transfected with specific siRNAs (closed symbols), control siRNA (open triangles) or were untransfected (open circles). Values are average fluorescence units from three replicate wells, representing the amount of DNA per well.

[0099] FIG. 8 shows the effect on growth inhibition of A549 cells by 10 nM RRM2B-1 (filled up-triangle) and RRM2B-3 (filled down-triangle) siRNA targeting ribonuclease reductase 2B, measured up to 120 hours post transfection, compared with the effect of a control siRNA (pen triangle) and growth of untransfected cells (open circle).

[0100] FIG. 9 shows the dose-dependent effect of RRM1 knockdown on A549 cells that were reverse transfected with increasing concentrations of siRNA. Growth inhibition by RRM1-targeted Stealth™ siRNAs (filled symbols) was measured 96 h post-transfection (filled symbols) and values were normalized to the control siRNA (ctrl-809; open squares) at 0.01 nM.

[0101] FIG. 10 shows the dose-dependent effect of RRM2 knockdown on A549 cells that were reverse transfected with increasing concentrations of siRNA. Growth inhibition by RRM2-targeted siRNAs (filled symbols) was measured 96 h post-transfection and values were normalized to the control siRNA (ctrl-809; open squares) at 0.01 nM.

[0102] FIG. 11 shows the long-term growth inhibition by RRM1 siRNA in A549 cells reverse transfected with 1 or 10 nM RRM1-3 (filled triangles) or control siRNA (81-c; open triangles). Growth inhibition was measured daily for ten days.

[0103] FIGS. 12A and B show the effect of siRNA on ribonucleotide reductase RRM1 mRNA and protein levels. In FIG. 12A, the effect on RRM1 mRNA levels was measured 24 hours after transfecting A549 cells with 1.0, 0.1 or 0.01 nM of RRM1-targeting siRNAs (RRM1-1 (light grey bar); RRM1-2 (dark grey bar); RRM1-3 (black bar)). Reduction in protein levels of A549 cells transfected with 10 nM RRM1-targeting (RRM1-2 and RRM1-3) and control (81-ctrl) siRNA at 48 and 72 hours after transfection measured by Western blotting is shown in FIG. 12B.

[0104] FIGS. 13A-D show the effect of the p53 status of wild type HCT-116 (FIGS. 13A and B) and p53 null HCT-116 (FIGS. 13C and D) cells on growth inhibition by RRM1 and RRM2-targeting siRNAs. Cells were reverse transfected with 1.0 nM (closed diamonds) or 10 nM (closed triangles) RRM1-3 (FIGS. 13A and C), RRM2-2 (FIGS. 13B and D) or 10 nM control siRNA (open circles). Growth was measured daily for up to 4 days post transfection.

[0105] FIGS. 14A and B show the induction of apoptosis following knockdown of RRM1, with or without treatment with cytarabine. The cell cycle distribution in A549 cells was analyzed following reverse transfection with control or pooled RRM1 siRNAs only (1 or 10 nM final siRNA concentration; FIG. 14A), and transfection with 10 nM pooled RRM1 siRNA together with 10 nM cytarabine (FIG. 14B) over 72 h post-transfection. Values are expressed as the percentage of the gated singlet population, alone and in combination with cytarabine.

[0106] FIG. 15 shows the effect of in vitro knockdown on xenograft tumor growth in vivo in CD-1 nude mice injected with A549 cells pre-transfected with 10 nM RRM1-2 (open circles) compared with the effect of control siRNA (open triangles) or untransfected cells (open squares).

[0107] FIGS. 16A and B represent the results of two separate experiments showing the effect on A549 xenografted tumors in CD-1 nude mice injected intratumorally with RRM1 siRNA (open circles), PBS (open squares) and a control siRNA (open triangles).

[0108] FIG. 16A shows the effect on tumor volume of 50 μg RRM1-targeting siRNA injected 3 times per week for 2 weeks, and FIG. 16B shows the effect on tumor volume of 25 μg siRNA injected 3 times per week for 3 weeks.

[0109] FIGS. 17A and B show the growth inhibition in SK-MeI-5 cells (FIG. 17A) and A549 cells (FIG. 17B) reverse transfected with 1.0, 10 or 40 nM of a pool of three siRNAs (closed symbols) targeting SLC1A5 (ASCT2), SLC2Ai (GLUT1), SLC7A5 (LAT1), SLC29A1 (ENT1) or SLC29A2 (ENT2), or a pool of one siRNA against each of the five targets (filled squares), or control siRNAs (control-1; control-2; open symbols). Growth inhibition was measured for 5 days.

[0110] FIGS. 18A and B show the reduction in mRNA levels in SK-MeI-5 cells (FIG. 18A) and A549 cells (FIG. 18B) measured 48 h after reverse transfection with 10 nM siRNA (SLC1A5 (ASCT2), SLC2A1 (GLUT1), SLC7A5 (LAT1), SLC29A1 (ENT1) or SLC29A2 (ENT2) or control siRNA (ctrl)).

[0111] FIG. 19 shows the growth inhibition by a pool of two YBX1 siRNAs in SK-MeI-5 cells reverse transfected with 0.1, 1.0, 10 or 40 nM YBX1 siRNA (filled squares) or control siRNA (open squares). Growth inhibition was measured after 120 h.

[0112] FIG. 20 shows the effect of siRNA on YBX1 protein levels 24 hours after transfecting A549 cells with 10 nM of YBX1-targeting siRNAs (labeled as 94 and 95). Reduction in protein levels was measured by Western blotting.

[0113] FIG. 21 shows the effect of siRNA-mediated inhibition of YBX1 gene expression in A549 cells grown in hypoxic versus normoxic conditions. Growth inhibition of A549 cells reverse transfected with 1.0 nM of YBX1-targeting siRNAs labeled 994, 856 and 931, grown for 120 h post-transfection under normoxic conditions (closed symbols) were compared with cells grown for 24 h under normoxic followed by 96 h under hypoxic conditions (open symbols). The percentage fluorescence obtained was normalized against a non-specific control (81ctrl).

[0114] FIGS. 22A to D show the effect of co-transfection with p53-targeting siRNA on YBX1 siRNA-mediated growth inhibition in A549, SK-MeI-5, wt HCT-116, p53 null HCT-116 cells. FIG. 22A shows the result of co-transfecting SK-MeI-5 cells with 1 nM p53 907 siRNA and 1 nM of the YBX1-specific siRNA (994; filled circle), compared with transfecting with the YBX1 siRNA alone (filled square) or a control siRNA (81 ctrl; open circle). FIG. 22B shows the result of co-transfecting A549 cells with 5 nM p53 907 siRNA and 5 nM of the YBX1-specific siRNA (open square) compared with transfecting with the YBX1 siRNA alone (filled square) or a control siRNA (open circle), and FIGS. 22C and D show the results of co-transfecting wt HCT-116 and p53 null HCT-116 cells, respectively, with 1 nM p53 907 siRNA and 1 nM of the YBX1-specific siRNA (994; filled circle), compared with transfecting with the YBX1 siRNA alone (filled square) or a control siRNA (open circle).

[0115] FIGS. 23A and B show potentiation of 5-FU toxicity in siRNA-transfected SK-Mel-5 cells (FIG. 23A) and A549 cells (FIG. 23B) transfected with 40 nM siRNA targeting SLC1A5, SLC7A5, SLC29A1, SLC29A2 and SLC2A1 (open symbols) and a pool of all five siRNAs (filled triangle), compared with a non-specific control siRNA (filled square).

[0116] FIG. 24 shows increased methotrexate toxicity in HCT-15 cells transfected with 40 nM siRNA targeting SLC1A5 (filled diamonds), SLC29A1 (filled triangles), and SLC2A1 (open triangles), compared with a pool of non-specific control siRNAs (filled squares) and mocked transfected cells (filled circles).

[0117] FIGS. 25A to C shows the effect of MDR1 knockdown on growth of drug resistance in HCT-15 cells, reverse transfected with 10 nM MDR1-specific siRNA or 10 nM control siRNA and continuously exposed to drug for 72 h. Cells transfected with the MDR1-targeting siRNA (FIG. 25; filled symbols) became more sensitive to the MDR1 substrates doxorubicin (FIG. 25A), paclitaxel (FIG. 25B), and etoposide (FIG. 25C), compared with control siRNA-transfected cells (FIG. 25A-C; open symbols).

[0118] FIGS. 26A to D show the effects of TYMS and DHFR knockdown (growth inhibition) on tumor cell growth and sensitivity to 5FU in HCT-116 and A549 cells transfected with 0.1, 1.0 and 10 nM siRNA after 96 h, in either normal or dialyzed fetal calf serum. FIGS. 26A and B shows the effects of knockdown on tumor cell growth and sensitivity to 5FU by TYMS and DHFR siRNA, respectively, in the presence of normal (open bars) or dialyzed fetal calf serum (filled bars) in HCT-116 cells, and FIGS. 26C and D shows the results obtained in A549 cells.

[0119] FIGS. 27A to F show the effect of TYMS knockdown on 5FU toxicity in HCT-116 cells transfected with 0.1, 1.0 and 10 nM of three TYMS-specific siRNAs (closed symbols), labeled TYMS-1 (FIGS. 27A and D), TYMS-2 (FIGS. 27B and E) and TYMS-3 (FIGS. 27C and F), or 1.0 and 10 nM control siRNA (809-ctrl; open symbols), and exposed to a serial dilution of 5FU (from 44 μM) continuously for 3 days, starting 24 h after transfection in medium containing either 10% normal FCS (FIGS. 27A to C) or 10% dialyzed FCS (FIGS. 27D to F).

[0120] FIGS. 28A to F show the effect of TYMS knockdown on 5FU toxicity in A549 cells transfected with 0.1, 1.0 and 10 nM of three TYMS-specific siRNAs (closed symbols), labeled TYMS-1 (FIGS. 28A and D), TYMS-2 (FIGS. 28B and E) and TYMS-3 (FIGS. 28C and F), or 1.0 and 10 nM control siRNA (81-ctrl; open symbols) and exposed to a serial dilution of 5FU (from at 44 μM) continuously for 3 days, starting 24 h after transfection in medium containing either 10% normal FCS (FIGS. 28A to C) or 10% dialyzed FCS (FIGS. 28D to F).

[0121] FIGS. 29A to F show the effect of DHFR knockdown on 5FU toxicity in HCT-116 cells transfected with 0.1, 1.0 and 10 nM of three DHFR-specific siRNAs (closed symbols), labeled DHFR-1 (FIGS. 29A and D), DHFR-2 (FIGS. 29B and E) and DHFR-3 (FIGS. 29C and F), or 1.0 and 10 nM control siRNA (809-ctrl; open symbols) and exposed to a serial dilution of 5FU (from 44 μM) continuously for 3 days, starting 24 h after transfection in medium containing either 10% normal FCS (FIGS. 29A to C) or 10% dialyzed FCS (FIGS. 29D to F).

[0122] FIGS. 30A to F show the effect of DHFR knockdown on 5FU toxicity in A549 cells transfected with 0.1, 1.0 and 10 nM of three DHFR-specific siRNAs (closed symbols), labeled DHFR-1 (FIGS. 30A and D), DHFR-2 (FIGS. 30B and E) and DHFR-3 (FIGS. 30C and F), or 1.0 and 10 nM control siRNA (81-ctrl; open symbols) and exposed to a serial dilution of 5FU (from 44 μM) continuously for 3 days, starting 24 h after transfection in medium containing either 10% normal FCS (FIGS. 30A to C) or 10% dialyzed FCS (FIGS. 30D to F).

### DETAILED DESCRIPTION OF THE INVENTION

[0123] As noted above, the present invention is generally directed to compositions and methods for the treatment of a cancer in a patient. In certain embodiments, the cancer is selected from the group consisting of: primary and metastatic tumors and carcinomas of the breast; colon; rectum; lung; oropharynx; hypopharynx; esophagus; stomach; pancreas; liver; gallbladder; bile ducts; small intestine; kidney; bladder; urothelium; cervix; uterus; ovaries; prostate; seminal vesicles; testes; endocrine glands, including thyroid, adrenal and pituitary; skin, including melanomas, sarcomas and Kaposi's sarcoma; tumors of the brain, nerves, eyes and meninges including astrocytomas, gliomas, glioblastomas, retinoblastomas, neuromas, neuroblastomas, myelomas; head and neck cancers; and solid tumors arising from hematopoietic malignancies such as leukemias and lymphomas.

[0124] The compositions disclosed herein comprise at least one unmodified or modified small interfering nucleic acid molecule (siNA) directed against a target gene. In certain embodiments, compositions are provided that comprise a complex including: (a) at least one “naked” (unmodified) or modified small interfering nucleic acid molecule (siNA) directed against a target gene, or a genetic construct that expresses the siNA(s) under the control of a tissue-specific promoter; and (b) a binding agent, such as an antibody, that specifically binds to a target antigen or cell surface molecule which is present on the surface of a target cell of interest. The target antigen recognizes and internalizes certain specific biological molecules, such that, on binding of the siNA-antibody or genetic construct-antibody complex to the target antigen, the complex is internalized into the target cell by endocytosis, the siNA or genetic construct is released from the complex, and the siNA reduces expression of the target gene by means of RNA interference.

[0125] As used herein, the term “target gene” refers to a polynucleotide that comprises a region that encodes a polypeptide of interest, and/or a polynucleotide region that regulates replication, transcription, translation or other processes important to expression of the polypeptide of interest.

[0126] As used herein, the term “small interfering nucleic acid molecule”, or siNA, refers to any nucleic acid molecule that is capable of modulating the expression of a gene by RNA interference (RNAi), and thus encompasses: short interfering RNA (siRNA); short interfering DNA (siDNA); double-stranded RNA (dsRNA); double-stranded DNA (dsDNA); complementary RNA/DNA hybrids; nucleic acid molecules containing modified (semi-synthetic) base/nucleoside or nucleotide analogues (which may or may not be further modified by conjugation to non-nucleic acid molecules); custom modified primary or precursor microRNA (miRNA); short hairpin RNA (shRNA) molecules; and longer (up to one kb or more) dsRNA or hairpin RNA molecules, so long as these do not activate non-specific interference, for example via interferon. The hairpin region may be short (e.g. 6 nucleotides), long (undefined length), or may include an intron that is efficiently spliced in the targeted cells or tissues. Additionally, multiple tandem repeats in one orientation (for example, three or more short sense repeats) are included under the definition of siRNA, as these can elicit a potent RNAi like response in some systems.

[0127] The term siRNA will be used in this disclosure as a prototypical small interfering nucleic acid molecule.

[0128] Examples of siNAs that may be effectively employed in the disclosed compositions and methods include the siRNAs provided in SEQ ID NO: 94-4803, 4806-4880, 4889-5003, and 5306-5308 (DNA sequences), and SEQ ID NO: 5112-5298 and 5303-5305 (RNA sequences) which are targeted against the sequences provided in SEQ ID NO: 1-15, and 17-92 as detailed below in Example 3. One of skill in the art will appreciate that, when comparing an RNA sequence to a DNA sequence, an RNA sequence will contain ribonucleotides where the DNA sequence contains deoxyribonucleotides, and further that the RNA sequence will typically contain a uracil at positions where the DNA sequence contains thymidine. Those skilled in the art will also understand that siNAs are double-stranded and that a siNA listed herein will be comprised of the listed sequence together with its complement.

[0129] In some embodiments the siNA is generated from an introduced DNA molecule that contains promoter and terminator sequences responsible for transcribing the nucleic acid sequences that comprise the siNA. The introduced DNA may be in the form of a covalently-closed linear or circular plasmid or a PCR product, and these will preferably contain little or no DNA of prokaryotic origin. DNA constructs may also contain a nuclear localization sequence, such as that derived from the SV40 enhancer, to promote nuclear uptake and expression of the construct. In certain embodiments, the siNA is under the control of a promoter that is specific for cancer cells, such as the HIF-1 promoter, the HK-II promoter, or a promoter region containing at least one response element involved in regulating transcription of HK-II, as described, for example, in International Patent Publication no. WO97/04104. Other promoters that may be effectively employed in the genetic constructs include those for c-erbB-2 for the treatment of breast cancer; PSA, osteocalin or clusterin for androgen-dependent and androgen-independent prostate cancers; EIA for melanoma; and survivin for melanoma and other cancers.

[0130] For use in conjunction with known cancer therapies, the genetic constructs may employ promoters that are responsive to stimuli currently used in the treatment of cancer. For example, hsp promoters can be activated by photodynamic therapy (Luna et al., Cancer Res. 60:1637-1644, 2000); the mortalin promoter is induced by low doses of ionizing radiation (Sadekova et al., Int. J. Radiat. Biol. 72:653-660, 1997); and the hsp27 promoter is activated by 17b-estradiol and estrogen receptor agonists (Porter et al., J. Mol. Endocrinol. 26:31-42, 2001).

[0131] Alternatively, promoters may be of the type activated by RNA polymerase III or RNA polymerase II. Those of the former type include U6, tRNAval, H1, and versions of these promoters modified to achieve higher levels of transcription. Promoters activated by RNA polymerase II may be constitutive (such as the widely used CMV and EF1α promoters), or may be transcribed in a preferred manner in a single cell, cell type, tissue type, or biochemical event. These latter promoters may be chosen for high level or low-level expression.

[0132] When a hairpin or custom miRNA is used, a single specific promoter may be employed. When two custom microRNAs with complementary target regions are employed, or when dsRNAs are to be formed from two separate strands, combinations of constitutive and specific, or specific promoters may be employed. In circumstances where reduced, but not eliminated, expression levels are desired, this may be achieved using completely or incompletely homologous antisense siNAs, or using promoters of varying transcriptional activity. Alternatively, siNA may be targeted to regions of mRNA that are either highly affected, or less completely affected, by an siNA, or more than one siNA sequence directed to the target gene, genes or a pathway may be used to achieve stronger interference.

[0133] The siNA may be targeted to the 5′ untranslated region, the coding region, or the 3′ untranslated region of the target gene or message. Additionally, regions of the promoter of a target gene, or regions usually upstream of a gene may be targeted for RNAi assisted heterochromatin formation.

[0134] An siNA can be unmodified or may be chemically-modified as described, for example, in International Patent Publication nos. WO03/070970, WO03/074654 and WO03/064626; and US Published Patent Applications nos. US2004/0014956, US2004/0192626, US2005/0282188, US2005/0233329, US2005/0020525, US2005/0266422, US2004/0171029, US2004/0171028, US2004/0203024, US2005/0037370, US2004/0171030, US2004/0161777, US2004/0146902, US2005/0119470, US2004/0147470, US2004/0161844, US2004/0171031, US2004/0171032, US2004/0147022, US2004/0147023, US2004/0171033, US2005/0053976, and US2005/0042647, the disclosures of which are hereby incorporated by reference. Where the siNA is a synthetic duplex, this may have symmetrical 3′ overhangs of 2-3 nt, asymmetrical overhangs at one or other end, or may be blunt-ended. Chemical modifications, when present in the duplex, may include nucleic acid residues, or analogs of nucleic acid residues, such as nucleotides with 2′-O-Me- or 2′-fluorine-modified ribose sugars. Such duplexes may be fully (i.e. at every nucleotide) or partially (at selected nucleotide positions) modified, and this modification may be on either the sense strand, the antisense strand, or both strands. Thus, for example, some or all of the nucleotides of an siNA may comprise modified nucleic acid residues, or analogs of nucleic acid residues. The hybridization characteristics of the modified siNA may be similar to or improved compared to the corresponding unmodified siNA. Such modifications can also improve the efficacy and safety of in vivo therapy by changing the stability, lifetime and circulation of the siNAs in the human body.

[0135] The siNA may be from 19 to 30 nucleotides in length (for example, 19, 20, 21, 22, 23, 24, 25, 26, 27, 28, 29 or 30 nucleotides) nucleotides in length, and comprises an antisense strand that is complementary to at least a portion of a nucleotide sequence, such as a mRNA sequence corresponding to a target DNA sequence. In certain embodiments, the siNA is 19 to 23 or 25 to 30 nucleotides in length, such as, but not limited to 21, 25 or 27 nucleotides in length. The siNA may also contain a sense strand that comprises the portion of the nucleotide sequence of interest. The sense and antisense strands may be separate, distinct sequences, as in a dsRNA molecule, or may be linked as, for example, in a shRNA molecule.

[0136] Those skilled in the art will appreciate that minor changes in the sequence of the siNAs directed against target sequences disclosed herein can yield siNAs that hybridize strongly and specifically to the target nucleic acid. For example, siNAs directed against target sequences that are shifted by one to four nucleotides 5′ or 3′ of the sequences disclosed herein may be effective. It is useful to administer more than one such variant to a target area, or a combination of several different siNAs targeting different regions in and around the desired gene (e.g., exons, introns, promoter, or intergenic regions).

[0137] In certain embodiments, the siNA is targeted against a gene or nucleotide sequence that functions in an energy metabolism pathway that is involved in the development and/or progression of a cancer, such as the glycolysis pathway, a gene or nucleotide sequence that is involved in the biosynthesis of nucleotides, or in glycogen metabolism, gene or nucleotide sequence that encodes an electron carrier that works with ATP to provide metabolic energy, or a gene or nucleotide sequence encoding a protein that functions in a transport mechanism that is involved in the development and/or progression of a cancer, such as sugar transport, amino acid transport, water-soluble vitamin transport, transporters controlling intracellular pH, and equilibrative nucleoside transporters.

[0138] In specific embodiments, the siNA employed in the compositions and methods disclosed herein is targeted against one or more subsequences listed in Table 8.

TABLE 8

| | | SEQ | |
|---|---|---|---|
| Target mRNA or promoter | Species | ID NO | Gene ID |
| Hypoxia inducible factor 1α (HIF-1α) | Human | 1 | ENST00000337138 |
| Hypoxia inducible factor 1α (HIF-1α) | Mouse | 2 | ENSMUST00000021530 |
| Hypoxia inducible factor 1β (HIF-1β) | Human | 3 | ENST00000322733 |
| Hypoxia inducible factor 1β (HIF-1β) | Mouse | 4 | ENSMUST00000015666 |
| Hexokinase II (HK-II) | Human | 5-7 | ENST00000290573 |
| Hexokinase II (HK-II) | Mouse | 8 | ENSMUST00000000642 |
| At least one promoter element involved | Human | 16 | AF148512 |
| in regulation of HK-II promoter | | | |
| Lactate dehydrogenase 5 (LDH-5) | Human | 9 | ENST00000227157 |
| Lactate dehydrogenase 5 (LDH-5 | Mouse | 10 | ENSMUST00000048209 |
| Phosphofructokinase, liver (PFKL) | Human | 11 | X15573 |
| 6-phosphofructo-2-kinase/fructose-2,6- | Human | 12 | OTTHUMT00000046653 |
| biphosphatase 3 (Pfkfb3) | | | |
| 6-phosphofructo-2-kinase/fructose-2,6- | Mouse | 13, 17 | ENSMUST00000062659 |
| biphosphatase 3 (Pfkfb3) | | | |
| Glucose 6-phosphate dehydrogenase | Human | 14 | OTTHUMT00000061165 |
| (G6PDH) | | | |
| Glucose 6-phosphate dehydrogenase | Mouse | 15 | ENSMUST00000004327 |
| (G6PDH) | | | |
| Phosphate Ribosyl pyrophosphate | Human | 18 | NM_002764 |
| synthase (PRPS1) | | | |
| Amido-phosphoribosyltransferase | Human | 19 | NM_002703 |
| (PPAT) | | | |
| Carbamoyl phosphate synthetase 1 | Human | 20 | ENST00000264705 |
| (CPS1) | | | |
| Carbamoyl phosphate synthetase 2 | Human | 21 | ENST00000264705 |
| (CAD) | | | |
| Ribonucleotide reductase subunit 1 | Human | 22 | ENST00000300738 |
| (RRM1) | | | |
| Thymidylate synthetase (TYMS) | Human | 23 | ENST00000323274 |
| Thymidylate synthetase (TYMS) | Mouse | 24 | ENSMUST00000026846 |
| Dihydrofolate reductase (DHFR) | Human | 25 | ENST00000307796 |
| Adenylate kinase (ATP-AMP | Human | 26 | ENST00000223836 |
| transphosphorylase) AK-1 | | | |
| NAD synthase (nicotinamide adenine | Human | 27 | ENST00000319023 |
| dinucleotide synthase) (NADSYN) | | | |
| FAD synthase (flavin adenine | Human | 28 | ENST00000292180 |
| dinucleotide synthase) (FLAD1) | | | |
| NADH-Q reductase (NADH | Human | 29 | NM_002495 |
| dehydrogenase ubiquinone) | | | |
| Cytochrome reductase (CCR, UQCRC2) | Human | 30 | ENST00000268379 |
| Cytochrome oxidase (COX5a) | Human | 31 | ENSG00000178741 |
| ATP synthase (F0F1-APTase) (ATP5B) | Human | 32 | ENST00000262030 |
| ATP-ADP translocase 1 (SLC25A4; | Human | 33 | NM_001151 |
| ANT1) | | | |
| ATP-ADP translocase 2 (SLC25A5; | Human | 34 | NM_001152.1 |
| ANT2) | | | |
| ATP-ADP translocase 3 (SLC25A6; | Human | 35 | NM_001636.1 |
| ANT3) | | | |
| Fatty Acid Synthase (FASN) | Human | 36 | NM_004104 |
| ATP citrate lyase (ACLY) | Human | 37 | NM_001096 |
| Ribonucleotide reductase subunit 2 | Human | 38 | NM_001034 |
| (RRM2) | | | |
| Ribonucleotide reductase p53 inducible | Human | 39 | NM_015713 |
| (RRM2B) | | | |
| CTP synthase | Human | 40 | NM_001905 |
| Inosine monophosphate dehydrogenase | Human | 41 | NM_000884 |
| 2 (IMPDH2) | | | |
| Deoxycytudune kinase (DCK) | Human | 42 | NM_000788 |
| Thymidine kinase 1 (TK1) | Human | 43 | NM_003258 |
| Thymidine kinase 2 (TK2) | Human | 44 | NM_004614 |
| Deoxyguanosine kinase (DGUOK) | Human | 45 | NM_080916 |
| Uridine monophosphate synthase | Human | 46 | NM_000373 |
| (UMPS) | | | |
| Dihydropyrimidine dehydrogenase | Human | 47 | NM_000110 |
| (DPYD) | | | |
| SLC2A1 (GLUT1) | Human | 48 | NM_006516.1 |
| SLC2A3 (GLUT3) | Human | 49 | NM_006931 |
| SLC2A5 (GLUT5) | Human | 50 | NM_003039.1 |
| SLC2A12 (GLUT12) | Human | 51 | NM_145176.1 |
| SLC29A1 (ENT1) | Human | 52 | NM_004955.1 |
| SLC29A2 (ENT2) | Human | 53 | NM_001532.2 |
| SLC29A3 (ENT3) | Human | 54 | NM_018344 |
| SLC29A4 (ENT4) | Human | 55 | NM_153247 |
| SLC28A1 (CNT1) | Human | 56 | NM_004213 |
| SLC28A2 (CNT2) | Human | 57 | NM_004212 |
| SLC28A3 (CNT3) | Human | 58 | NM_022127 |
| SLC1A4 (ASCT1) | Human | 59 | NM_003038 |
| SLC1A5 (ACST2) | Human | 60 | NM_005628.1 |
| SLC3A2 (4F2hc) | Human | 61 | NM_002394.3 |
| SLC6A14 (ATB^{0,+}) | Human | 62 | NM_007231 |
| SLC7A5 (LAT1) | Human | 63 | NM_003486.4 |
| SLC7A11 (xCT) | Human | 64 | NM_014331.2 |
| SLC43A1 (LAT3) | Human | 65 | NM_003627 |
| SLC38A4 (SNAT3) | Human | 66 | NM_018018 |
| SLC38A5 (SNAT5) | Human | 67 | NM_033518 |
| SLC5A6 (SMVT1) | Human | 68 | NM_021095.1 |
| SLC19A1 (RFT, RFC) | Human | 69 | NM_003056 |
| SLC19A2 (ThTr1) | Human | 70 | NM_006996 |
| SLC19A3 (ThTr2) | Human | 71 | NM_025243 |
| SLC23A1 (SVCT1) | Human | 72 | NM_005847 |
| SLC23A2 (SVCT2) | Human | 73 | NM_005116.5 |
| SLC25A1 (CIC) | Human | 74 | NM_005984 |
| SLC25A10 (DIC) | Human | 75 | NM_012140 |
| SLC9A1 (NHE1) | Human | 76 | NM_003047.2 |
| SLC16A1 (MCT1) | Human | 77 | NM_003051.2 |
| PMCA1 (ATP2B1) | Human | 78 | NM_001001323 |
| PMCA2 (ATP2B2) | Human | 79 | NM_001683 |
| PMCA3 (ATP2B3) | Human | 80 | NM_021949 |
| PMCA4 (ATP2B4b) | Human | 81 | NM_001684 |
| ATP6V1A | Human | 82 | NM_001690 |
| ATP6V1B2 | Human | 83 | NM_001693 |
| ATP6V1C1 | Human | 84 | NM_001007254 |
| ATP6V1E1 | Human | 85 | NM_001696 |
| ATP6V1F | Human | 86 | NM_004231 |
| ATP7A (Menkes protein) | Human | 87 | NM_000052 |
| ATP7B (Wilson Protein) | Human | 88 | NM_000053 |
| ABCB1 (MDR1) | Human | 89 | NM_000927.3 |
| ABCC4 (MRP4) | Human | 90 | NM_005845 |
| ABCC5 (MRP5) | Human | 91 | NM_005688 |
| YBX1 | Human | 92 | NM_004559 |

[0139] Methods for selecting suitable regions in a mRNA target are disclosed in the art (see, for example, Vickers et al., J. Biol. Chem. 278:7108-7118, 2003; Elbashir et al., Nature 411:494-498, 2001; Elbashir et al., Genes Dev. 15:188-200, 2001). Preferably, selected target sequences are sensitive to down regulation by low concentrations of siRNA. Guidelines for the design of siNA include those provided in Ambion's Technical Bulletin #506 (available from Ambion Inc., Austin, Tex.), and are described below. The use of low concentrations of siRNA (for example, nanomolar or sub-nanomolar concentrations) and avoidance of sequences that occur in alternative spliced gene products assist in limiting off-target, non-sequence specific, effects. Assessing whether a gene has been down regulated, and the extent of down regulation, can be performed using, for example, real-time PCR, PCR, western blotting, flow cytometry or ELISA methods.

[0140] Methods for the preparation of genetic constructs, or expression vectors, comprising, or encoding, siNA targeted against nucleotide sequences of interest are detailed below.

[0141] As used herein, the term “binding agent”, refers to a molecule that specifically binds to a target antigen expressed on the surface of a target cells, and includes, but is not limited to, antibodies, including monoclonal antibodies and polyclonal antibodies; antigen-binding fragments thereof, such as F(ab) fragments, F(ab′)₂ fragments, variable domain fragments (Fv), small chain antibody variable domain fragments (scFv), and heavy chain variable domains (V_{HH}); small molecules; hormones; cytokines; ligands; peptides and viruses (either native or modified). Antibodies, and fragments thereof, may be derived from any species, including humans, or may be formed as chimeric proteins which employ sequences from more than one species. The term “binding agent” as used herein thus encompasses humanized antibodies and veneered antibodies.

[0142] A binding agent is said to “specifically bind,” to a target antigen if it reacts at a detectable level (within, for example, an ELISA assay) with the target antigen, and does not react detectably with unrelated antigens under similar conditions.

[0143] Antibodies, and fragments thereof, may be prepared by any of a variety of techniques known to those of ordinary skill in the art. See, e.g., Harlow and Lane, Antibodies: A Laboratory Manual, Cold Spring Harbor Laboratory, 1988. In general, antibodies can be produced by cell culture techniques, including the generation of monoclonal antibodies as described, for example, by Kohler and Milstein, Eur. J. Immunol. 6:511-519, 1976, and improvements thereto, via transfection of antibody genes into suitable bacterial or mammalian cell hosts, in order to allow for the production of recombinant antibodies, or by protein synthesis.

[0144] In order to minimize any off-target effects, the binding agents employed in the disclosed compositions and methods are cell type-specific. Preferably the binding agent is specific for internalizable cell surface molecules or antigens found on tumor cells. Examples of such molecules include, but are not limited to, the receptors for transferrin, endothelin I and VEGF, including the VEGF-165b isomer. Examples of binding agents that may be usefully employed in the disclosed compositions include: antibodies against transferrin and endothelin available from Abcam Inc. (Cambridge, Mass.), and antibodies against VEGF, available from Delta Biolabs, LLC (Campbell, Calif.), and antigen-binding fragments thereof.

[0145] In one embodiment, the compositions disclosed herein comprise a binding agent, such as an antibody, connected to a genetic construct by means of a streptavidin-biotin linkage. As used herein, the term “streptavidin” encompasses both streptavidin and avidin, and derivatives or analogues thereof that are capable of high affinity, multivalent or univalent binding of biotin. Techniques for the preparation of conjugates containing streptavidin-biotin linkages are well known in the art and include, for example, those described in U.S. Pat. Nos. 6,287,792 and 6,217,869, the disclosures of which are hereby incorporated by reference. Biotin may be incorporated into the genetic construct using, for example Biotin-21-dUTP™ (BD Biosciences Clontech, Palo Alto, Calif.), which is a dTTP analog with biotin covalently attached to the pyrimidine ring through a 21-atom spacer arm. The biotin-labeled genetic construct is then linked to the streptavidin-antibody conjugate via biotin-streptavidin binding, using techniques well known to those of skill in the art. Streptavidin-biotin linkers may, alternatively, be employed to link binding agent directly to “naked” siNA.

[0146] In a further embodiment, complexes are provided that comprise a binding agent, such as an antibody, and a polynucleotide-binding component, such as a polycation, that is covalently bonded to the antibody through, for example, disulfide bonds. Polycations that may be employed as polynucleotide-binding components include, for example, polylysine, polyarginine, polyornithine, polyethylenimine chitosan and basic proteins, such as histones, avidin and protamines. The polynucleotide-binding component is then attached to a genetic construct by means of electrostatic attraction between the opposite charges present on the genetic construct and the polynucleotide-binding component. The antibody is thus bound to the genetic construct without functionally altering either the genetic construct or the antibody. Both the bond between the antibody and the polynucleotide-binding components and that between the polynucleotide-binding component and the genetic construct are cleaved following internalization of the complex into the target cell. Such complexes may be prepared as described, for example, in U.S. Pat. No. 5,166,320.

[0147] Cleavable polymeric linkers which may be effectively employed to attach a genetic construct of the present invention to a binding agent are also described in U.S. Pat. No. 6,627,616.

[0148] Alternatively, helicases and other RNA-binding proteins, may be linked to the binding agent, or antibody, and naked siNA is, in turn, linked to the helicase prior to administration. Examples of such helicases and RNA-binding proteins are provided in Sasaki et al., Genomics 82:323-330, 2003, Yan et al., Nature 426:469-474, 2003 and Anderson et al., Mol. Cell. Proteomics, 3:311-326, 2004. In an alternative embodiment, the genetic construct is encapsulated in a liposome or polymer, or attached to a lipid or polymer carrier, which is in turn attached to a binding agent, such as an antibody directed against the target antigen. Encapsulation of the genetic construct within a liposome protects the construct from degradation by endonucleases. Methods for the encapsulation of biologically active molecules, such as nucleic acid molecules and proteins, within liposomes or polymers, and for the preparation of nucleic acid-lipid (lipoplex) and nucleic acid-polymer (polyplex) carrier complexes are well known in the art. See, for example, U.S. Pat. Nos. 6,627,615, 4,241,046, 4,235,871 and 4,394,448; and Liposome Technology: Liposome Preparation and Related Techniques, ed. G. Gregoriadis, CRC Press, 1992. Liposome formulation, development and manufacturing services are available for example, from Gilead Liposome Technology Group (Foster City, Calif.). Lipids for the preparation of liposomes are available, for example from Avanti Polar Lipids, Inc. (Alabaster, Ala.).

[0149] The resulting liposome carrier containing the genetic construct of interest is then conjugated to the binding agent, using methods well known in the art, such as those taught in U.S. Pat. Nos. 5,210,040, 4,925,661, 4,806,466 and 4,762,915. Such methods include the use of linkers that fall into four major classes of functionality: conjugation through amide bond formation; disulfide or thioether formation; hydrazone formation; or biotin-streptavidin binding. In a preferred embodiment, the liposome is attached to the binding agent, such as an antibody, by means of a maleimide linker, as described, for example, in U.S. Pat. No. 6,372,250, the disclosure of which is hereby incorporated by reference.

[0150] In a preferred embodiment, the liposome employed in the disclosed compositions is a pegylated liposome, wherein the surface of the liposome is conjugated with multiple (up to several thousand) strands of poly(ethylene glycol) (PEG) of approx. 2000 Da. The binding agent is then conjugated to the tips of some of the PEG strands. The diameter of the liposome is preferably within the range of 100 nm to 10 μm. The preparation of such pegylated liposomes and attachment of monoclonal antibodies to the liposomes is performed as described, for example, in Shi and Pardridge, Proc. Natl. Acad. Sci. USA 97:7567-7572, 2000; and Shi et al., Proc. Natl. Acad. Sci. USA 98:12754-12759, 2000. Pegylation of the liposome should increase the stability of the liposome and prevent non-specific attachment of cells, such as macrophages, and proteins to the liposome. The preparation of pegylated liposomes which encapsulate shRNA expression plasmids and are conjugated to monoclonal antibodies, and the use of such compositions in vivo in silencing gene expression in brain cancer is described in Zhang et al., J. Gene Med. 5:1039-1045, 2003.

[0151] Alternatively, the siNA or genetic construct is packaged in an adenovirus or adeno-associated virus vector which, upon infection of the target cell, releases its genetic material enabling construct expression. In this embodiment, viral capsid proteins may act as the binding agent and target the siNA or genetic construct to specific cells.

[0152] Adenoviruses (AV) and adeno-associated viruses (AAV) do not integrate their genetic material into the host genome and do not require host replication for gene expression. AV and AAV vector delivery systems are thus well suited for rapid and efficient, transient expression of heterologous genes in a host cell. AAV vector delivery systems have previously been shown to be effective in the treatment of cystic fibrosis (Aitken et al., Hum. Gene Ther. 12:1907-1916, 2001). Examples of AAV vector delivery systems which may be effectively employed in the present invention include, but are not limited to, those described in U.S. Pat. No. 6,642,051 and references cited therein. Improvements have been made in the efficiency of targeting adenoviral vectors to specific cells by, for example, coupling adenovirus to DNA-polylysine complexes and by employing strategies that exploit receptor-mediated endocytosis for selective targeting. See, for example, Curiel et al., Hum. Gene Ther. 3:147-154 (1992); and Cristiano and Curiel, Cancer Gene Ther. 3:49-57 (1996).

[0153] Alternatively, for situations where stable transfection is desired, viral vectors that insert genetic material into a host cell's genome may be employed. Examples of such vectors include lentiviral, retroviral, plasmid and MLV vectors. The design and use of lentiviral vectors suitable for gene therapy is described, for example, in U.S. Pat. Nos. 6,531,123, 6,207,455 and 6,165,782, the disclosures of which are hereby incorporated by reference. The use of lentivector-delivered RNA interference in silencing gene expression in transgenic mice is described by Rubinson et al. (Nat. Genet. 33:401-406, 2003).

[0154] The present invention further provides methods for the treatment of a cancer in a patient by administration of a therapeutically effective amount of a composition disclosed herein.

[0155] As used herein, a “patient” refers to any warm-blooded animal, including, but not limited to, a human. Such a patient may be afflicted with disease or may be free of detectable disease. In other words, the methods may be employed for the prevention or treatment of disease. As discussed above, the methods may be employed in conjunction with other known therapies currently employed for the treatment of cancer. For example, the disclosed compositions may be administered before, during or after, radiotherapy, chemotherapy, photodynamic therapy and/or surgery.

[0156] In general, the disclosed compositions may be administered by injection (e.g., intradermal, intramuscular, intravenous, intratumoral or subcutaneous), intranasally (e.g., by aspiration), orally, transdermally or epicutaneously (applied topically onto skin). In one embodiment, the compositions are in a form suitable for delivery to the mucosal surfaces of the airways leading to or within the lungs. For example, the composition may be suspended in a liquid formulation for delivery to a patient in an aerosol form or by means of a nebulizer device similar to those currently employed in the treatment of asthma.

[0157] For use in therapeutic methods, the disclosed compositions may additionally contain a physiologically acceptable carrier. While any suitable carrier known to those of ordinary skill in the art may be employed in the compositions, the type of carrier will vary depending on the mode of administration. For parenteral administration, such as subcutaneous injection, the carrier preferably comprises water, saline, alcohol, a fat, a wax or a buffer. For oral administration, any of the above carriers or a solid carrier, such as mannitol, lactose, starch, magnesium stearate, sodium saccharine, talcum, cellulose, glucose, sucrose and magnesium carbonate, may be employed. Biodegradable microspheres (e.g., polylactic galactide) may also be employed as carriers for the compositions. Suitable biodegradable microspheres are disclosed, for example, in U.S. Pat. Nos. 4,897,268 and 5,075,109. Other components, such as buffers, stabilizers, biocides, etc., may be included in the disclosed compositions. The compositions may be provided in single dose or multi-dose containers, such as sealed ampoules and/or vials, and can be stored either frozen or freeze-dried.

[0158] The preferred frequency of administration and effective dosage, which will vary from one individual to another and will depend upon the particular disease being treated, may be determined by one skilled in the art, using known techniques. Preferably, siNA is administered at a dose of between 1 and 10 mg/kg. The compositions may be administered in a single dosage or in multiple, divided, dosages.

[0159] In further embodiments, systems and methods are provided wherein an RNAi therapeutic is compared directly to one or more existing drugs having proven in vivo efficacy for the treatment of a disease state, as illustrated in FIG. 4. In such systems and methods one or more existing therapies serves as a gold standard against which a new RNAi therapy(ies) is compared.

[0160] Such systems and methods include a step of comparing the in vitro and in vivo efficacy of one or more existing chemotherapy(ies) to a panel of new siRNA-based therapeutic candidates. Demonstration of the utility of candidate RNAi-based cancer therapeutics can be achieved by comparing the inhibition of gene expression and/or protein function by a known cancer drug in vitro with inhibition of gene expression by a target specific siRNA sequence. For comparative purposes, the siRNA targets are derived from the genes and/or promoters targeted by the known cancer drug. Based on results from such an in vitro comparison, siRNA sequences are selected for further in vivo studies and targeted delivery by cell-specific promoters and/or delivery vehicles. Thus, the systems and methods provided herein are useful to establish the criteria to identify candidate siRNAs that target the same cellular protein and thus have therapeutic potential.

[0161] In one example, the disclosed systems and methods are employed for the identification of siRNAs suitable for the treatment of disease(s) susceptible to treatment by modulating the expression of the gene for thymidylate synthetase. In these exemplary systems and methods, a transfectable tumor cell line is titrated with a panel of siRNA candidates designed against the gene for thymidylate synthetase. In parallel, each siRNA candidate is compared to a major current oncology drug, 5-fluorouracil, which specifically targets thymidylate synthetase and therefore serves as a clinical standard against which the efficacy of each siRNA molecule may be assessed.

[0162] In an alternative example, systems and methods are provided for the identification of siRNAs suitable for the treatment of disease(s) susceptible to treatment by modulating the expression of the enzyme dihydrofolate reductase. This enzyme is needed to regenerate dihydrofolate from tetrahydrofolate—the reaction that provides energy for thymidylate synthetase as it converts dUMP to dTMP. The drug methotrexate targets the enzyme dihydrofolate reductase and is the current standard of treatment for diseases susceptible to the downregulation of dihydrofolate reductase activity. siRNAs are designed based upon the dihydrofolate reductase gene, titrated in a readily transfectable cell line, and each siRNA's killing activity is compared directly to that of methotrexate.

[0163] Thus, systems and methods are provided for identifying novel therapeutics for the treatment of cancers and other diseases using target specific siRNA target sequences, which systems and methods comprise the steps of comparing the inhibition of gene expression with the effect of known cancer drugs on in vitro cells, selecting sequences that inhibit expression, and specifically delivering those siRNAs to the desired target cell. All such systems and methods employ at least one known chemotherapeutic agent that targets specific cellular proteins in a human cancer cell thereby establishing the criteria by which candidate siRNAs having the potential to target the gene encoding the same cellular protein are identified.

[0164] In related embodiments, therapeutics, including combination therapeutics, are provided which employ one or more known chemotherapeutics in sequential and/or simultaneous combination with one or more therapeutic siRNA molecules. Such combination therapeutics provide an advantage over stand-alone chemotherapeutics by reducing drug toxicity and/or emergence of drug-resistant cells that no longer respond to the chemotherapeutic alone.

[0165] The following Examples are offered by way of illustration and not by way of limitation. Sequences referred to in the Examples below are given in both DNA and RNA nomenclature and represent the sequence of the antisense or guide strands of the siNAs. The final configuration of the strands within the duplexes will consist of a combination of ribonucleotides and deoxyribonucleotides. Further modifications of the phosphodiester backbone and nucleobases, often incorporated into siNAs, have not been explicitly listed, but are well-known in the art.

### EXAMPLE 1

### Preparation of Antibody-Conjugated Liposomes

[0166] Preparation of Pegylated Liposomes, Encapsulation of Genetic Constructs and conjugation with monoclonal antibody may be carried out as follows.

[0167] 1-Palmitoyl-2-oleoyl-sn-glycerol-3-phosphocholine (POPC; Avanti Polar Lipids, Alabaster Ala.; 19.2 μmol), didodecyldimethylammonium bromide (DDAB; Avanti Polar Lipids; 0.2 μmol), distearolyphosphatidylethanolamine ((DSPE)-PEG 2000; Shearwater Polymers, Huntsville, Ala.; 0.6 μmol) and DSPE-PEG 2000-maleimide (30 nmol) are dissolved in chloroform/methanol (2:1, vol:vol) followed by evaporation. The lipids are dispersed in 1 ml 0.05 M Tris-HCl buffer (pH=8.0) and sonicated for 10 min. Supercoiled plasmid DNA is added to the lipids and the liposome/DNA dispersion evaporated to a final concentration of 200 mM at a volume of 100 μl. The dispersion is frozen in ethanol/dry ice for 4-5 min and thawed at 40° C. for 1-2 min. This freeze-thaw cycle is repeated 10 times. The liposome dispersion is then diluted to a lipid concentration of 40 mM, followed by extrusion 10 times each through two stacks of polycarbonate filter membranes. The mean vesicle diameters may be determined using a Microtrac Ultrafine Particle Analyzer (Leeds-Northrup, St. Petersburg, Fla.).

[0168] Plasmid attached to the exterior of the liposomes is removed by nuclease digestion as described by Monnard et al. (Biochim. Biophys. Acta 1329:39-50, 1997). For digestion of the unencapsulated DNA, 5 units of pancreatic endonuclease 1 and 5 units of exonuclease II are added in 5 mM MgCl₂ and 0.1 mM DTT to the liposome/DNA mixture after extrusion. After incubation at 37° C. for 1 h, the reaction is stopped by adding 7 mM EDTA.

[0169] Monoclonal antibody specific for the target antigen is thiolated using a 40:1 molar excess of 2-iminothiolane (Traut's reagent) as described by Huwyler et al., Proc. Natl. Acad. Sci. USA 93:14164-14169, 1996. Thiolated antibody is then incubated with the liposomes overnight at room temperature, and the resulting immunoliposomes are separated from free monoclonal antibody by, for example, gel filtration chromatography.

### EXAMPLE 2

### Preparation of Peptide-Conjugated Polyplexes

[0170] Conjugation of targeting peptides to polycations such as polyethylenimine (PEI), and preparation of peptide-targeted polyplexes may be carried out by the method of Schiffelers et al. (Nucleic Acids Res. 32:1-10, 2004) as follows.

[0171] NHS-PEG-VS is obtained from Nektar (San Carlos, Calif.). The targeting RGD peptide with the sequence H-ACDARGDAFCG-OH (SEQ ID NO: 93) is synthesized, oxidized to form the intramolecular disulfide bridge, and purified by reverse-phase HPLC (Auspep Ltd., Parkeville, Australia). The resulting peptide (6 mg) is dissolved in DMSO (60 μl), neutralized with triethylamine (TEA, 2 mol/mol peptide), and coupled to NHS-PEG-VS (21 mg in 40 μl DMSO) for 4 hours at room temperature. The reaction is stopped by adding trifluoroacetic acid (TFA, equimolar to TEA), and the mixture is lyophilized. The intermediate RGD-PEG-VS is purified by dialysis against water, and the compound lyophilized to give a yield of 50-90%. Conjugation is confirmed by mass spectral analysis (matrix-assisted laser desorption ionization).

[0172] In the second step of synthesis, various amounts of the purified RGD-PEG-VS intermediate are dissolved in sodium carbonate buffer pH 9.0 (100 μl) and reacted with linear polyethylenimine at room temperature for 16 hours. The reaction is terminated by the addition of an excess of TFA and lyophilized. The product is purified by gel filtration on a Superdex Peptide column in 0.1% TFA, and lyophilized. The degree of conjugation of RGD-PEG to PEI is determined by proton NMR spectrometry on a 400 MHz spectrometer from the ratio of the areas under the peaks corresponding to the —CH₂-protons of PEI (2.8-3.1 ppm) and PEG (3.3-3.6 ppm).

[0173] Complexes are formed by mixing equal volumes of solutions of RGD-PEG-PEI and plasmid DNA in HEPES-buffered 5% glucose to give a molar ratio of PEI amine to DNA phosphate of 5:1 to 10:1. The amount of free DNA is quantitated using the Pico Green assay (Invitrogen Corporation, Carlsbad, Calif.).

### EXAMPLE 3

### Design of siRNA Oligonucleotides

[0174] Potential target sites in the mRNA are identified based on rational design principles, which include target accessibility and secondary structure prediction. Each of these may affect the reproducibility and degree of knockdown of expression of the mRNA target, and the concentration of siRNA required for therapeutic effect. In addition, the thermodynamic stability of the siRNA duplex (e.g., antisense siRNA binding energy, internal stability profiles, and differential stability of siRNA duplex ends) may be correlated with its ability to produce RNA interference (Schwarz et al., Cell 115:199-208, 2003; Khvorova et al., Cell 115:209-216, 2003). Empirical rules, such as those provided by the Tuschl laboratory (Elbashir et al., Nature 411:494-498, 2001; Elbashir et al., Genes Dev. 15:188-200, 2001) and the Morishita Laboratory (University of Tokyo; Ui-Tei et al., Nucleic Acids Research 32:936-948, 2004) are also used. Software and internet interactive services for siRNA design are available at the following websites: Ambion, Invitrogen, Deqor, Dharmacon, Emboss-2.9.0, Genscript, Cold Spring Harbor Laboratory (Jack Lin), Tuschl Laboratory (MPI), OptiRNA (Cui et al., Computer Methods and Programs in Biomedicine), Qiagen, siDirect and siRNA Design websites. Levenkova et al. describe a software system for design and prioritization of siRNA oligos (Bioinformatics 20:430-432, 2004). The Levenkova system is available on the internet and is downloadable freely for both academic and commercial purposes. The siRNA molecules disclosed herein were based on the Ambion, Invitrogen, Ui-Tei, Deqor, Elbashir and Levenkova recommendations.

[0175] The selection of siRNA oligos disclosed in this application was based primarily on uniqueness vs. human sequences (i.e., a single good hit vs. human Unigene, and a big difference in hybridization temperature (Tₘ) against the second best hit) and on GC content (i.e., sequences with % GC in the range of 40-60%).

[0176] Optionally, for a more detailed picture on the potential hybridization of the oligos, RNA target accessibility and secondary structure prediction can be carried out using, for example, Sfold software (Ding Y and Lawrence, C. E. (2004) Rational design of siRNAs with Sfold software. In: RNA Interference: from Basic Science to Drug Development. K. Appasani (Ed.), Cambridge University Press; Ding and Lawrence, Nucleic Acids Res. 29:1034-1046, 2001; Nucleic Acids Res. 31:7280-7301, 2003). Sfold is available on the internet. RNA secondary structure determination is also described in Current Protocols in Nucleic Acid Chemistry, Beaucage et al., ed., 2000, at 11.2.1-11.2.10.

[0177] The targeted region is selected from a cDNA sequence, such as the cDNA sequence for lactate dehydrogenase 5 (SEQ ID NO: 9). Potential target sequences and positions are typically identified by searching for specific 23 nucleotide (nt) motifs (“Tuschl patterns” such as AA(N19)TT, where N is any nucleotide, and AA is referred to herein as the “target motif leader”, NA(N21), or BA(N21), where B=C, G, U; Elbashir S M et al., Methods 26:199-213, 2002) in the cDNA sequence, starting at about 50-100 nt downstream of the start codon. The nt 22 and nt 23 need not be considered in searching for Tuschl patterns, since they are not involved in the base pairing between the mRNA target and the antisense siRNA strand. “Sense siRNA” is used herein to mean a target sequence without the NN leader. For example, the sequence of the sense siRNA corresponds to (N19)TT of the Tuschl pattern AA(N19)TT (positions 3-23 of the 23 nt motif).

[0178] The siRNAs may be designed with symmetric 3′ overhangs in order to form a symmetric duplex (Elbashir et al., EMBO J. 20:6877-6888, 2001). For both sense and antisense siRNAs, either dTdT or UU are used as the 3′ overhang. Thus for siRNAs with an AA target motif leader, the AA base pairs with the dTdT or UU overhang of the antisense siRNA. For BA leaders, the A pairs with the first dT or U of the overhang. It is known however, that the overhang of the sense sequence can be modified without affecting targeted mRNA recognition.

[0179] The antisense siRNA is synthesized as the complement to position 1-21 of the 23 nt motif. The 3′ most nucleotide can be varied, but the nucleotide at position 2 of the 23 nt motif is selected to be complementary to the targeted sequence. These methods are well known in the art. Where it is desired to efficiently express RNAs from pol III promoters, the first transcribed nt should be a purine. For example, the siRNA may be selected corresponding to the target motif NAR(N17) YNN, where R is (A,G) and Y is (C,U). The target sequence motifs are selected to have about 30-70% GC content, preferably 40-60% GC content. As used herein, the “% GC content” is calculated as: [the number of G or C nucleotides in the target sequence/21 for an AA target motif leader]×100, [the number of G or C nucleotides in the target sequence/20 for a BA target motif leader]×100, and [the number of G or C nucleotides in the target sequence/19 for an NB target motif leader]×100.

[0180] Following selection of siRNA duplexes from the target sequence, the thermodynamic properties of the sequences are determined, e.g., using the Sfold software referred to above. As used herein, “DSSE” refers to the differential stability of the siRNA duplex ends, i.e., the average difference between 5′ antisense and 5′ sense free energy values for the four nucleotide base pairs at the ends of the duplex. It has been shown that the 5′ antisense region is less stable than the 5′ sense terminus in functional siRNA duplexes and vice versa for nonfunctional siRNA duplexes (Khvorova et al., Cell 115:209-216, 2003). It is known that the siRNA duplex can be functionally asymmetric, in the sense that one of the two strands preferentially triggers RNAi (Schwartz et al., Cell 155:199-208, 2003).

[0181] As used herein, “AIS” refers to the average internal stability of the duplex at positions 9-14 from the 5′ end of the antisense strand. Comparisons between functional and nonfunctional siRNA duplexes indicate that the functional siRNA has lower internal stability in this region. It is proposed that flexibility in this region may be important for target cleavage (the mRNA is cleaved between position 9 and 10) and/or release of cleaved products from RISC to regenerate RISC (Khvorova et al., Cell 115:209-216, 2003).

[0182] The siRNA sequences and their thermodynamic properties are further selected according to the following criteria: (a) 40%≦GC content≦60%; (b) antisense siRNA binding energy ≦−15 kcal/mol; and (c) exclusion of target sequence with at least one of AAAA, CCCC, GGGG or UUUU. For siRNAs with NN dinucleotide leaders, two additional criteria are used: (d) DSSE>0 kcal/mol (Zamore asymmetry rule); and (e) AIS>−8.6 kcal/mol (cleavage site instability rule). This is the midpoint between the minimum of −3.6 and maximum of −13.6 (Khvorova et al., Cell 115:209-216, 2003).

[0183] To increase the likelihood that only one gene will be targeted for degradation, the selected siRNA sequences are further checked for uniqueness against human and murine gene libraries (e.g., TIGR GI, ENSEMBL human genome), using Blast algorithms. Also, to increase the likelihood that the selected sequences will be active, sequences directed against targets having SNPs in the base pairing regions are excluded.

[0184] The exemplary siRNAs provided in SEQ ID NO: 94-163, 234-1883, 2004-4803, 4806-4868, 4872-4880, 4889-5003, 5112-5298, and 5303-5308 correspond to the target sequences provided in SEQ ID NO: 1-15, and 17-92, as shown in Table 9 below. SEQ ID NO: 94-163, 234-1883, 2004-4803, 4806-4868, 4872-4880, 4889-5003, 5112-5298, and 5303-5308 represent the antisense of the target sequences and are listed as both DNA and RNA versions to include all nucleic acid possibilities targeting those sequences (for example RNA, DNA, mixmer, modified bases and modified backbones).

TABLE 9

| | Alternative | Target | Antisense | Antisense |
|---|---|---|---|---|
| | nomenclature or | SEQ ID | DNA | RNA |
| Gene nomenclature | abbreviation | NO: | SEQ ID NO: | SEQ ID NO: |
| HIF-1α | HIF-1α | 1 | 94-103 and | |
| | | | 234-473 | |
| HIF-1β | ARNT | 3 | 104-113, | 5112-5114 |
| | | | 474-823 and | |
| | | | 4806-4808 | |
| Hexokinase II | HK-II | 5-7 | 114-133, | 5118-5120 |
| | | | 824-1093 | |
| | | | and 4812-4814 | |
| LDH-A | Lactate | 9 | 134-143, | 5121-5123 |
| | dehydrogenase 5; | | 1094-1343 | |
| | LDH-5 | | and 4815-4817 | |
| Pfkfb3 | PFKFB3 | 12, 17 | 144-153, | |
| | | | 1344-1533, | |
| | | | 1764-1773 | |
| | | | and 2004-2193 | |
| G6PDH | H6PDH | 14 | 154-163, | 5115-5117 |
| | | | 1534-1763 | |
| | | | and 4809-4811 | |
| Phosphate ribosyl | PRPS1 | 18 | 4821-4823 | 5127-5129 |
| pyrophosphate | | | | |
| synthase | | | | |
| Carbamoyl | CPS1 | 20 | 1774-1783, | 5130-5132 |
| phosphate synthetase 1 | | | 2194-2333, | |
| | | | 4824-4826 | |
| Carbamoyl | CAD | 21 | 1784-1793, | 5133-5135 |
| phosphate synthetase 2 | | | 2334-2513, | |
| | | | 4827-4829 | |
| Ribonucleotide | RRM1 | 22 | 1794-1803, | 5136-5138 |
| reductase subunit 1 | | | 2514-2833, | |
| | | | 4830-4832 | |
| Thymidylate | TYMS | 23 | 1804-1813, | 5139-5141 |
| synthetase | | | 2834-3023, | |
| | | | 4833-4835 | |
| Dihydrofolate | DHFR | 25 | 1814-1823, | 5142-5144 |
| reductase | | | 3024-3333, | |
| | | | 4836-4838 | |
| Adenylate kinase | AK1 | 26 | 1824-1833, | 5145-5147 |
| | | | 3334-3503, | |
| | | | 4839-4841 | |
| NAD synthase | NADSYN | 27 | 1834-1843, | 5148-5150 |
| | | | 3504-3733, | |
| | | | 4842-4844 | |
| FAD synthase | FLAD1 | 28 | 1844-1853, | 5151-5153 |
| | | | 3734-4053, | |
| | | | 4845-4847 | |
| Cytochrome oxidase | COX5A | 31 | 1864-1873, | 5154-5156 |
| | | | 4364-4533, | |
| | | | 4848-4850 | |
| ATP synthase | ATP5B | 32 | 1874-1883, | 5157-5159 |
| (F0F1-APTase) | | | 4534-4803, | |
| | | | 4851-4853 | |
| Fatty Acid Synthase | FASN | 36 | 4854-4856 | 5160-5162 |
| ATP Citrate Lyase | ACLY | 37 | 4857-4859 | 5163-5165 |
| ATP-ADP | SLC25A5 | 34 | 4860-4862 | 5166-5168 |
| translocase; ANT2 | | | | |
| ATP-ADP | SLC25A6 | 35 | 4863-4865 | 5169-5171 |
| translocase; ANT3 | | | | |
| Cytochrome | UQCRC2 | 30 | 1854-1863, | 5172-5174 |
| reductase | | | 4054-4363, | |
| | | | 4866-4868 | |
| Ribonucleotide | RRM2 | 38 | 5306-5308 | 5303-5305 |
| reductase subunit 2 | | | | |
| Ribonucleotide | RRM2B | 39 | 4872-4874 | 5175-5177 |
| reductase subunit 2B | | | | |
| CTP synthase | CTPS | 40 | 4875-4877 | 5178-5180 |
| Inosine | IMPDH2 | 41 | 4878-4880 | 5181-5183 |
| monophosphate | | | | |
| dehydrogenase 2 | | | | |
| Deoxycytidine | DCK | 42 | 4986-4988 | 5281-5283 |
| kinase | | | | |
| Thymidine kinase 1 | TK1 | 43 | 4989-4991 | 5284-5286 |
| Thymidine kinase 2 | TK2 | 44 | 4992-4994 | 5287-5289 |
| Deoxyguanosine | DGUOK | 45 | 4995-4997 | 5290-5292 |
| kinase | | | | |
| Uridine | UMPS | 46 | 4998-5000 | 5293-5295 |
| monophosphate | | | | |
| synthase | | | | |
| Dihydropyrimidine | DPYD | 47 | 5001-5003 | 5296-5298 |
| dehydrogenase | | | | |
| ASCT2 | SLC1A5 | 60 | 4889-4891 | 5184-5186 |
| GLUT1 | SLC2A1 | 48 | 4892-4894 | 5187-5189 |
| GLUT5 | SLC2A5 | 50 | 4895-4897 | 5190-5192 |
| GLUT12 | SLC2A12 | 51 | 4898-4900 | 5193-5195 |
| LAT1 | SLC7A5 | 63 | 4901-4903 | 5196-5198 |
| xCT | SLC7A11 | 64 | 4904-4906 | 5199-5201 |
| 4F2hc | SLC3A2 | 61 | 4907-4909 | 5202-5204 |
| SMVT1 | SLC5A6 | 68 | 4910-4912 | 5205-5207 |
| ThTr1 | SLC19A2 | 70 | 4913-4915 | 5208-5210 |
| SVCT2 | SLC23A2 | 73 | 4916-4918 | 5211-5213 |
| NHE1 | SLC9A1 | 76 | 4919-4921 | 5214-5216 |
| MCT1 | SLC16A1 | 77 | 4922-4924 | 5217-5219 |
| CIC | SLC25A1 | 74 | 4925-4927 | 5220-5222 |
| DIC | SLC25A10 | 75 | 4928-4930 | 5223-5225 |
| ENT1 | SLC29A1 | 52 | 4931-4933 | 5226-5228 |
| ENT2 | SLC29A2 | 53 | 4934-4936 | 5229-5231 |
| ATP2B1 | PMCA1 | 78 | 4937-4939 | 5232-5234 |
| ATP2B2 | PMCA2 | 79 | 4940-4942 | 5235-5237 |
| ATP2B3 | PMCA3 | 80 | 4943-4945 | 5238-5240 |
| ATP2B4 | PMCA4 | 81 | 4946-4948 | 5241-5243 |
| ATP6V1A | ATPase, H+ | 82 | 4949-4951 | 5244-5246 |
| | transporting, | | | |
| | lysosomal 70 kDa, | | | |
| | V1 subunit A | | | |
| ATP6V1B2 | ATPase, H+ | 83 | 4952-4954 | 5247-5249 |
| | transporting, | | | |
| | lysosomal 56/58 kDa, | | | |
| | V1 subunit B2 | | | |
| ATP6V1C1 | ATPase, H+ | 84 | 4955-4957 | 5250-5252 |
| | transporting, | | | |
| | lysosomal 42 kDa, | | | |
| | V1 subunit C1 | | | |
| ATP6V1E1 | ATPase, H+ | 85 | 4958-4960 | 5253-5255 |
| | transporting, | | | |
| | lysosomal 31 kDa, | | | |
| | V1 subunit E1 | | | |
| ATP6V1F | ATPase, H+ | 86 | 4961-4963 | 5256-5258 |
| | transporting, | | | |
| | lysosomal 14 kDa, | | | |
| | V1 subunit F | | | |
| ATP7A | ATPase, Cu++ | 87 | 4964-4966 | 5259-5261 |
| | transporting, alpha | | | |
| | polypeptide | | | |
| ATP7B | ATPase, Cu++ | 88 | 4967-4969 | 5262-5264 |
| | transporting, beta | | | |
| | polypeptide | | | |
| ABCC4 | ABC transporter; | 89 | 4970-4972 | 5265-5267 |
| | MRP4 | | | |
| ABCC5 | ABC transporter; | 90 | 4973-4975 | 5268-5270 |
| | MRP5 | | | |
| ABCB1 | ABC transporter; | 91 | 4976-4980 | 5271-5275 |
| | MDR1 | | | |
| YBX1 | Y Box-binding | 92 | 4981-4985 | 5276-5280 |
| | protein 1; YB-1 | | | |

### EXAMPLE 4

### Synthesis and Testing of siRNA Duplexes

[0185] siRNA may be prepared by various methods, for example by chemical synthesis, or from suitable templates using in vitro transcription, siRNA expression vectors or PCR generated siRNA expression cassettes. Preferably, chemical synthesis is used.

[0186] Methods for chemical synthesis of RNA are well known in the art and are described, for example, in Usman et al., J. Am. Chem. Soc. 109:7845, 1987; Scaringe et al., Nucleic Acids Res. 18:5433, 1990; Wincott et al., Nucleic Acids Res. 23:2677-2684, 1995; and Wincott et al., Methods Mol. Biol. 74:59, 1997. Twenty-one nucleotide siRNAs may be synthesized, for example, using protected ribonucleoside phosphoramidites and a DNA/RNA synthesizer, and are commercially available from a number of suppliers, such as Proligo (Hamburg, Germany), Dharmacon Research (Lafayette, Colo.), Perbio Science (Rockford, Ill.), Glen Research (Sterling, Va.), ChemGenes (Ashland, Mass.), and Ambion Inc. (Austin, Tex.). The siRNA strands can then be deprotected, annealed and purified before use, if necessary. Annealing can be carried out, for example, by incubating single-stranded 21-nt RNAs in 100 mM potassium acetate, 30 mM HEPES-KOH at pH 7.4, 2 mM Mg acetate, 1 min at 90° C., then 1 hr at 37° C. The solution is then stored frozen at −20° C. Useful protocols can be found in Elbashir et al., Methods 26:199-213, 2002.

### EXAMPLE 5

### RNAi Expression Vectors

[0187] Expression vectors for generating siRNA fragments against selected gene targets are constructed by ligating annealed, chemically synthesized, oligonucleotide pairs into the appropriate vector (for example pSilencer (Ambion) or pSiren (BD Bioscience)), or by PCR amplification of cDNA corresponding to siRNA sequences. For expression from vectors, siRNA sequences should start with 5′G residues. Symmetric 3′ overhangs and appropriate restriction sequences may be added during amplification or within the synthesized oligonucleotides. The amplified sequences are subcloned into, for example, pcDNA3 vectors (Invitrogen, Carlsbad, Calif.).

[0188] Tumor cell promoters, such as the HK-II promoter (SEQ ID NO: 16), are cloned into expression vectors containing a fluorescent reporter gene, such as EGFP, and tested in human and murine cancer cell lines (American Type Culture Collection (ATCC), Manassas, Va.), for their ability to confer tumor cell-specific expression. Based on these experiments, appropriate promoters are selected and subcloned into specific RNAi vectors.

[0189] An exemplary RNAi vector is shown in FIG. 5. The vector can be constructed based on commercially available vectors such as pSilencer from Ambion and comparable vectors from other suppliers. Alternatively, covalently-closed linear constructs, containing only the shRNA expression cassette, can be used. These constructs can be generated by PCR or restriction digestion followed by ligation of short hairpin oligos to yield endonuclease-resistant covalently-closed molecules. In a further embodiment, these constructs may contain nuclear localization sequences to promote nuclear uptake and expression of the construct. Such sequences may be either encoded in the DNA (Dean, Exp. Cell. Res. 230:293-302, 1997) or covalently linked peptide moieties (Zanta et al., Proc. Nat. Acad. Sci. USA 96:91-96, 1999).

### EXAMPLE 6

### RNAi-Directed Transcriptional Silencing

[0190] For long-term suppression of target gene expression, it would be advantageous to silence transcription by producing double-stranded RNAi in the nucleus that is capable of triggering transcriptional gene silencing of target gene expression. This may be done by introducing RNAi constructs that are expressed in the nucleus, and that contain promoter sequences directed against the target gene promoter or the promoter of a transcription factor that activates the target gene promoter. RNAi-dependent chromatin silencing has been demonstrated in both fission yeast and plants (reviewed by Matzke and Matzke, Science 301:1060-1061, 2003). In plants, the synthesis of double-stranded RNA containing promoter sequences triggers transcriptional gene silencing and methylation of the target promoter (Mette et al., EMBO J. 19:5194-5201, 2000).

[0191] Examples of short hairpin RNA sequences are given in SEQ ID NO: 164 to 173 for inhibition of HIF-1α; SEQ ID NO: 174 to 183 for inhibition of HIF-1β; SEQ ID NO: 184 to 203 for inhibition of hexokinase II; SEQ ID NO: 204 to 213 for inhibition of lactate dehydrogenase 5; SEQ ID NO: 214 to 223 and 1884 to 1893 for inhibition of pfkfb3; SEQ ID NO: 224 to 233 for inhibition of G6PDH; SEQ ID NO: 1894 to 1903 for inhibition of CPS1; SEQ ID NO: 1904 to 1913 for inhibition of CAD; SEQ ID NO: 1914 to 1923 for inhibition of ribonucleotide reductase subunit 1; SEQ ID NO: 1924 to 1933 for inhibition of thymidylate synthetase; SEQ ID NO: 1934 to 1943 for inhibition of dihydrofolate reductase; SEQ ID NO: 1944 to 1953 for inhibition of adenylate kinase; SEQ ID NO: 1954 to 1963 for inhibition of NAD synthase; SEQ ID NO: 1964 to 1973 for inhibition of FAD synthase; SEQ ID NO: 1974 to 1983 for inhibition of cytochrome reductase; SEQ ID NO: 1984 to 1993 for inhibition of cytochrome oxidase; and SEQ ID NO: 1994 to 2003 for inhibition of ATP synthase.

[0192] Expression cassettes are designed to express siRNAs in the nucleus under the control of a human U6 snRNA promoter or a tissue specific promoter (see, for example, Miyagishi and Taira, Nature Biotechnol. 20:497-500, 2002; Paul et al., ibid, 505-508). The cassette also contains U6 termination sequences. The desired target gene promoter sequences or transcription factor sequences are subcloned into the cassette, e.g., a pU6 plasmid, or a linear derivative of such a plasmid. To promote nuclear uptake, these constructs can be engineered to include nuclear localization sequences. Various strategies may be tested, including the production of short hairpin siRNAs containing one or more inverted DNA repeats and/or tandem DNA repeats of promoter-containing sequences, and synthesis of separate sense and antisense promoter RNAs in a single construct with two different promoters.

[0193] Guidelines for constructing hairpin siRNA expression cassettes may be found, for example, in the Ambion Technical Bulletin #506 (Ambion Inc., Austin, Tex.).

[0194] Chromatin silencing in cells transfected with nuclear-targeted siRNA vectors is assessed by methods to detect gene-specific mRNA or protein expression such as quantitative PCR, Northern blotting, ELISA, flow cytometry and western blotting. Alternatively, this may be assessed by methylation analysis of the promoter region using methylation-specific restriction enzyme analysis, methylation-specific PCR, or bisulfite treatment of genomic DNA fragments followed by cloning and sequencing.

### EXAMPLE 7

### siRNA Mediated Silencing of Thymidylate Synthase

[0195] siRNA mediated silencing in Human A549 cells A549 cells (ATCC No. CCL-185), a human lung cancer cell line, were cultured in RPMI 1640 medium with 5% v/v dialyzed fetal calf serum. Cells were seeded at a density of 2×10⁴ cells/100 μl in 96-well plates. Stealth™ siRNA duplexes targeting the thymidylate synthase (SEQ ID NO: 23) gene were transfected at concentrations of 6, 12, and 50 nM into the A549 cells using Lipofectamine 2000 transfection reagent (Invitrogen). After 72 h, cell viability was assessed by measuring cell proliferation using a standard MTT assay (Mosman, J. Immunol. Methods 65:55-63, 1983).

[0196] Transfecting cells with the thymidylate synthetase-targeting duplex (SEQ ID NO: 4883 (DNA), and SEQ ID NO: 5139 (RNA)) lead to a dose-dependent inhibition of cell growth (FIG. 6). Using a control duplex (SEQ ID NO: 4804 (DNA), and SEQ ID NO: 5301 (RNA)) against an irrelevant target, no effect was observed.

### EXAMPLE 8

### siRNA-Mediated Inhibition of Ribonuclease Reductase

### In Vitro Growth Inhibition

[0197] A549 cells (human lung cancer cell line; ATCC No. CCL-185), SK-MeI-5 cells (human melanoma cell line; ATCC No. HTB-70), MCF-7 cells (human adenocarcinoma cell line; ATCC No. HTB-22), HCT-116 cells (colorectal carcinoma; ATCC CCL-247) and HCT-116 p53 null cells (derived from ATCC No. CCL-247; Bunz et al., Science 282:1497-1501, 1998) were cultured in RPMI 1640 medium with 10% v/v heat-inactivated fetal calf serum (FCS). Cells were seeded at a density of 5×10⁴ cells/cm² in multi-well tissue culture plates. Sequences of Stealth™ siRNA duplexes (Invitrogen) targeting human ribonucleotide reductase subunit 1 (SEQ ID NO: 22) and subunit 2 (SEQ ID NO; 38) are given in SEQ ID NO: 4830-4832 (DNA), and SEQ ID NO: 5136-5138 (RNA) for RRM1, and SEQ ID NO: 5306-5308 (DNA), and SEQ ID NO: 5303-5305 (RNA) for RRM2. siRNAs were transfected at different concentrations into cells using Lipofectamine™ RNAiMAX transfection reagent (Invitrogen). Non-specific siRNA (SEQ ID NO: 4804 and 4805 (DNA), and SEQ ID NO: 5301 and 5302 (RNA)) were used as controls. The cellular DNA content was measured using a SYBR Green I-based fluorometric assay at 24, 48, 72 and 96 hours after transfection (120 hours for the MCF-7 cells), as follows. At the indicated time points following reverse transfection, cells were harvested and frozen at −80° C. overnight. Cells were thawed and cell lysis buffer (phosphate-buffered saline (PBS) containing 1% Triton X-100, pH 7) and SYBR Green I (1:10⁵ V/V; Invitrogen) was added to the wells and incubated overnight in the dark at 4° C.

[0198] The following day, cell lysates were mixed thoroughly, and DNA fluorescence was measured with a Wallac Victor² plate reader (Turku, Finland) set at an excitation frequency of 485 nm and measuring emission at 535 nm.

[0199] The growth inhibition in cells transfected with RRM1 and RRM2 siRNAs are shown in FIG. 7A-F. Cell growth was inhibited by the RRM1 siRNAs in the A549 (FIG. 7A), SK-MeI-5 (FIG. 7B) and MCF-7 cells (FIG. 7C), with the greatest effect on the A549 cells. Similarly, cell growth was inhibited by the RRM2 siRNAs in the A549 (FIG. 7D), SK-MeI-5 (FIG. 7E) and MCF-7 cells (FIG. 7F), with the greatest effect on the A549 and SK-MeI-5 cells. Minimal or no growth inhibition was observed with the non-specific siRNA control in all cell lines compared with growth of untransfected cells.

[0200] Growth inhibition in A549 cells by two siRNAs (SEQ ID NO: 4872 and 4873 (DNA), and SEQ ID NO: 5175 and 5176 (RNA)) targeting the ribonucleotide reductase 2B subunit (RRM2B; SEQ ID NO: 39) is shown in FIG. 8. The cells were transfected with 10 nM siRNA and growth inhibition followed up to 120 hours post-transfection. No inhibition of growth by the RRM2B siRNAs was observed compared with the control siRNA (SEQ ID NO: 4804 (DNA), and SEQ ID NO: 5301 (RNA)) or untransfected cells.

### Dose-Dependent Effect of RRM Knockdown on A549 Cell Growth

[0201] To determine the effect of different concentrations of RRM1 and RRM2 siRNAs on growth inhibition, A549 cells were reverse transfected with 0.01, 0.1, 1.0 and 10 nM siRNA (RRM1: SEQ ID NO: 4830-4832 (DNA, and SEQ ID NO: 5136-5138 (RNA); RRM2: SEQ ID NO: 5306-5308 (DNA), and SEQ ID NO: 5303-5305 (RNA)) and cell growth measured at 96 h post-transfection. Values were normalized to the control siRNA (SEQ ID NO: 4805 (DNA), and SEQ ID NO: 5302 (RNA)) at 0.01 nM. All three RRM1 siRNAs strongly inhibited growth at 1 nM, with RRM1-2 inhibiting growth by 50% at 0.1 nM (FIG. 9). Growth inhibition of RRM2 was achieved at 1 and 0.1 nM siRNA with all three RRM2 siRNAs tested (FIG. 10).

### Duration of RRM1 Knockdown in A549 Cells

[0202] To determine the duration of the knock-down effect of RRM1-targeting siRNA, A549 cells were reverse transfected with 1 or 10 nM RRM1-3 (SEQ ID NO: 4832 (DNA, and SEQ ID NO: 5138 (RNA)) or control siRNA (SEQ ID NO: 4804 (DNA), and SEQ ID NO: 5301 (RNA)), and growth followed over time. Growth inhibition was measured daily as described above for up to ten days. RRM1-3-mediated RRM1 silencing inhibited growth for at least 10 days post-transfection at both 1 and 10 nM (FIG. 11).

Effect of siRNA Knockdown on Ribonucleotide Reductase RRM1 mRNA Level

[0203] A549 cells were transfected with 10 nM RRM1-1 (SEQ ID NO: 4830 (DNA), and SEQ ID NO: 5136 (RNA); light grey bar in FIG. 12A), RRM1-2 (SEQ ID NO: 4831 (DNA), and SEQ ID NO: 5137 (RNA); dark grey bar in FIG. 12A), RRM1-3 (SEQ ID NO: 4832 (DNA), and SEQ ID NO: 5138 (RNA); black bar in FIG. 12A) or control siRNA (SEQ ID NO: 4804 (DNA), and SEQ ID NO: 5301 (RNA)) (open bar in FIG. 12A) and relative mRNA levels quantified 24 h post-transfection. RNA was purified from cells using Trizol® extraction as per the manufacturer's protocol (Invitrogen). cDNA was prepared by digesting approximately 200 ng purified RNA with DNAse I (Invitrogen) for 15 minutes at room temperature, followed by 15 minutes at 65° C. in the presence of 25 mM EDTA. 30 ng random primers were added and incubated for 10 minutes at room temperature, 1 minute on ice; Superscript III polymerase (Invitrogen) was added in presence of 5 nM DTT (Sigma, St Louis, Mo.) and 1 mM deoxyribonucleotides (Invitrogen), and the reaction incubated at 25° C. for 5 minutes, followed by an hour at 55° C. cDNA was diluted 1:3 in 10 mM Tris pH 7.0, and quantitative RT-PCR carried out on an ABI Prism 7900HT (Applied Biosciences, Inc., Foster City, Calif.) using FastStart TaqMan SYBRGreen (Roche, Basel, Switzerland) and specific primers at 360 nM for RRM1 and RRM2 and the housekeeping genes HPRT and Lamin. Primer sequence pairs used for RRM1, RRM2, HPRT and lamin are given in SEQ ID NO: 4881 and 4882; 4883 and 4884; 4885 and 4886; 4887 and 4888 respectively. As little as 0.01 nM RRM1-1 siRNA effectively silenced RRM1 mRNA expression as shown in FIG. 12A.

Effect of siRNA Knockdown on Ribonucleotide Reductase Protein Levels

[0204] Cell lysates were prepared from A549 cells 48 and 72 h post-transfection with 10 nM RRM1-specific siRNA (SEQ ID NO: 4830-4832 (DNA), and SEQ ID NO: 5136-5138 (RNA)) or control siRNA (SEQ ID NO: 4804 (DNA), and SEQ ID NO: 5301 (RNA)). Following Western blotting onto Immobilon-P PVDF filer (Millipore, Bedford Mass.), membranes were probed with a goat anti-human polyclonal antibody specific for RRM1 (Santa Cruz Biotechnology, Inc., Santa Cruz Calif.), at a concentration of 0.4 mg/ml. HRP-conjugated donkey anti-goat IgG (80 mg/ml; Santa Cruz) was used as a secondary antibody, and signal was detected with an ECL Plus Western blotting Detection System (GE Healthcare, UK) using a Typhoon Scanner (Molecular Dynamics, GE Healthcare, UK). FIG. 12B shows siRNA-mediated reduction in protein levels in the cells up to 72 hours post transfection compared with the control siRNA.

### Effect of p53 Status on Ribonucleotide Reductase Knockdown

[0205] To determine the effect of the p53-status of cells on RRM1 and RRM2 knockdown, growth inhibition of wild type (wt) HCT-116 and p53 null HCT-116 cells by RRM1 and RRM2-targeted siRNA were determined. Cells were reverse transfected with 1.0 and 10 nM RRM1-3 (SEQ ID NO: 4832 (DNA), and SEQ ID NO: 5138 (RNA)), 1.0 and 10 nM RRM2-2 (SEQ ID NO: 5307 (DNA), and SEQ ID NO: 5304 (RNA)) or 10 nM control siRNA (SEQ ID NO: 4804 (DNA), and SEQ ID NO: 5301 (RNA)), and growth measured daily for up to 4 days post transfection. RRM1 knockdown was equally growth inhibitory in p53 wt HCT-116 (FIG. 13A) and p53 null HCT-116 (FIG. 13C). RRM2 knockdown was more growth inhibitory in p53 null HCT-116 (FIG. 13D) than p53 wt HCT-116 (FIG. 13B).

### Silencing of RRM1 Leads to Induction of Apoptosis

[0206] The mechanism by which RRM1 silencing inhibited growth was investigated using flow cytometric cell cycle analysis techniques. A549 cells were reverse transfected with a pool of RRM1 siRNAs (SEQ ID NO: 4830-4832 (DNA), and SEQ ID NO: 5136-5138 (RNA)) or control siRNA (SEQ ID NO: 4804 (DNA), and SEQ ID NO: 5301 (RNA)) at 1 or 10 nM final siRNA concentration (FIG. 14A). The transfection was also repeated with 10 nM pooled RRM1 siRNA in the presence of 10 nM chemotherapeutic nucleoside analog cytarabine (FIG. 14B) and the formation of a singlet population followed over 72 hours. As seen in FIG. 14A, there was a rapid arrest of the cell cycle with an early accumulation of cells in S phase in the first 24 h post transfection. This initial S-phase arrest was followed by the induction of apoptosis, as defined by DNA content less than G1 cells, and by 72 h the majority of the cells had a sub-G1 DNA content. There was a minor increase in apoptotic RRM1 siRNA-treated A549 cells subsequently exposed to 10 nM cytarabine (FIG. 14B). This suggests that the inhibition of DNA synthesis and induction of apoptosis are the major consequences of RRM1 knockdown rather than a sensitization to chemotherapeutic nucleoside analogs. Cell cycle arrest is indicated by a gradual accumulation over time of cells in S-phase, and this is followed by the appearance of cells in the apoptotic sub-G1 population (FIG. 14B).

### Effect on Tumor Growth of Transfection of Cells Pre-Implantation

[0207] To determine the effect of RRM1 knockdown on tumor growth, A549 cells (human lung cancer cell line; ATCC No. CCL-185) were reverse-transfected prior to implantation in CD-1 nude mice. In 175 cm² culture flasks, 10×10⁶ A549 cells (in RPMI supplemented with 10% fetal calf serum) were added to pre-made lipoplexes. To make lipoplexes, Lipofectamine RNAiMAX in serum-free RPMI was added to an equal volume of serum-free RPMI containing siRNA (RRM1-2; SEQ ID NO: 4831 (DNA), and SEQ ID NO: 5137 (RNA)) and a control siRNA (SEQ ID NO: 4804 (DNA), and SEQ ID NO: 5301 (RNA)). After addition of cells, the final concentration of siRNA in the flask was 10 nM. Untransfected cells served as a further control. Flasks were incubated at 37° C. for 24 h to allow transfection to proceed.

[0208] The cells were harvested by trypsinization 24 h after the transfection, washed twice in PBS and viable cells were counted. Equal numbers of cells (1×10⁷) were inoculated into CD-1 nude mice (n=7-9). Briefly, 5 to 7 weeks old nude mice were subcutaneously (s.c.) injected in the right flank with A549 cells in 100 μl PBS. Tumor growth was monitored 3 times per week by measuring tumor sizes using a digital caliper. Tumor volume was expressed in mm using the formula: V=a²×b×0.52, where a and b represent the minimum and maximum tumor diameter, respectively. Mean tumor volumes calculated from each measurement were then plotted in a standard graph to compare the tumor growth of transfected cells to that of control.

[0209] Tumors developed in all mice injected with untransfected cells or cells treated with the control siRNA. There was no significant difference in tumor growth rate between these two control groups (FIG. 15: open squares and open triangles). Only two of eight mice in the RRM-1 siRNA-treated group had measurable tumors and the tumor growth rate was reduced dramatically compared to the control groups (FIG. 15: open circles). Six weeks after the cell inoculation, the average tumor size from RRM-1 siRNA transfectants (49.1±18.4 mm³) was significantly smaller than those of the tumors from untransfected cells (470.9±84.5 mm³; P<0.001; Student's t-test) and the control siRNA transfectants (370.7±63.8 mm³; P<0.001).

Treatment of Established Tumors with RRM1-Targeting siRNA

[0210] A549 cells (6−8×10⁶ cells) were s.c. inoculated into CD-1 nude mice as described above. When tumors reached an average volume of approximately 100 mm³, the tumor-bearing mice were randomly assigned into three different treatment groups (RRM1 siRNA, control siRNA and PBS) with 5 to 6 mice in each group. There were no significant differences in tumor volumes among groups prior to the initiation of treatments. Mice were anesthetized by gaseous isoflurane and 50 μl siRNA or PBS was injected directly into tumors using a 30-gauge needle. Two experiments were conducted. In the first experiment (IT#1), the animals received a dose of 50 μg of siRNA in each intratumoral (i.t.) injection and the injections were performed 3 times per week for 2 weeks. In the second experiment (IT#2), 25 μg siRNA was used and mice were injected 3 times per week for 3 weeks. The tumor volume was determined immediately before each injection by perpendicular measurements of the shortest and longest diameters as described above.

[0211] As shown in FIGS. 16A and 16B, in both experiments i.t. injection of RRM1-targeting siRNA led to a significant inhibition in the tumor growth. In the first experiment, on day 15 after treatment initiation (4 days after the last injection), the average tumor volume in animals treated with RRM1 siRNA was 161.7±16.1 mm³, which was significantly smaller than those in PBS and control siRNA treated mice (251.1±20.9 mm³ and 238.7±41.4 mm³ respectively; FIG. 16A). In the second experiment, animals treated with RRM1 siRNA showed inhibition of tumor growth by 46% and 41% compared to PBS and control siRNA group respectively (FIG. 16B). On day 21 post-treatment initiation (3 days after the last injection), the tumor volume in RRM1 siRNA treated mice was 147±17.2 mm³ whereas the tumor volume in PBS- and control siRNA treated animals was 271.9±38.3 mm³ and 248.9±37.3 mm³ respectively.

### EXAMPLE 9

### siRNA Mediated Silencing of Transporter Genes

[0212] The effect of siRNA-mediated transporter gene knockdown on cancer cell growth and mRNA levels was tested as detailed below. A pool of three siRNAs targeting SLC1A5 (ASCT2; SEQ ID NO: 4889-4891 (DNA), and SEQ ID NO: 5184-5186 (RNA)), SLC2A1 (GLUT1; SEQ ID NO: 4892-4894 (DNA), and SEQ ID NO: 5187-5189 (RNA)), SLC7A5 (LAT1; SEQ ID NO: 4901-4903 (DNA), and SEQ ID NO: 5196-5198 (RNA)), SLC29A1 (ENT1; SEQ ID NO: 4931-4933 (DNA), and SEQ ID NO: 5226-5228 (RNA)) or SLC29A2 (ENT2; SEQ ID NO: 4934-4936 (DNA), and SEQ ID NO: 5229-5231 (RNA)), or a pool of one siRNA against each of the five targets (SEQ ID NO: 4891, 4893, 4901, 4931 and 4934 (DNA), and SEQ ID NO: 5186, 5186, 5196, 5226, 5229 (RNA)), or control siRNAs (control-1: SEQ ID NO: 4804 (DNA), and SEQ ID NO: 5301 (RNA); control-2: SEQ ID NO: 4805 (DNA), and SEQ ID NO: 5302 (RNA)) were tested to determine down-regulation of target genes in A549 (human lung carcinoma cell line; ATCC Cat. No. CCL-185), and SK-MeI-5 (human melanoma cell line; ATCC Cat. No. HTB-70) cells. In 24-well culture plates, (2×10⁴) cells were transfected with a final concentration of 1, 10 or 40 nM siRNA, using Lipofectamine 2000 transfection reagent (Invitrogen, Carlsbad Calif.). Transfections contained three siRNAs against each individual target (SLC2A1, SLC29A1, SLC29A2, SLC1A5, or SLC7A5) or one siRNA against each of the 5 targets (pool). Controls used were either control-1, or both control-1 and control-2 together. At 24 hour-intervals post-transfection, plates were harvested by removing medium and freezing at −80° C. The next day, plates were removed and DNA content in wells was quantified with the CyQuant™ cell proliferation kit (Invitrogen, Carlsbad, Calif.). As shown in FIG. 17, the growth of SK-MeI-5 (FIG. 17A) and A549 (FIG. 17B) cells transfected with 10 nM siRNAs targeting the transporters listed above was markedly reduced compared with controls.

[0213] At 48 h post-transfection, RNA was extracted and real-time PCR was carried out to determine relative levels of transporter mRNA. In each case, transfection of the specific siRNA resulted in a decrease in the cognate mRNA as shown in FIGS. 18A and B, whereas control siRNA had no effect.

[0214] It is known that siRNA can produce non-specific concentration-dependent effects on mammalian gene expression (Scherer and Rossi, Nature Biotechnol. 21:1457-1465, 2003; Persengiev et al., RNA 10:12-18, 2004). These off-target effects can be minimized by selecting siRNAs with unique sequences, and using them at subnanomolar to nanomolar concentrations. In the above experiments, siRNA concentration is optimized for downregulation and nonspecific effects. Non-specific effects are assessed by microarray-based expression profiling.

### EXAMPLE 10

### siRNA-Mediated Inhibition of Cancer Cell Growth

[0215] siRNA-mediated inhibition of cancer cell growth was determined in A549 cells as follows. A549 cells (human lung cancer cell line; ATCC No. CCL-185) were cultured in RPMI 1640 medium with 10% v/v heat-inactivated fetal calf serum. Cells were seeded at a density of 5×10³ cells/cm² in multi-well tissue culture plates. Stealth™ siRNA duplexes (Invitrogen) targeting genes involved in cancer energy and metabolism pathways and listed in Table 9, were transfected at 10 nM into cells using Lipofectamine™ RNAiMAX transfection reagent (Invitrogen). Non-specific siRNA (SEQ ID NO: 4804 and 4805 (DNA), and SEQ ID NO: 5301 and 5302 (RNA)) were used as controls. The cellular DNA content was measured using a SYBR Green I-based fluorometric assay at 96 hours after transfection. The cells were harvested and frozen at −80° C. overnight. Cells were thawed and cell lysis buffer (phosphate-buffered saline (PBS) containing 1% Triton X-100, pH 7) and SYBR Green I (1:10⁵ v/v; Invitrogen) was added to the wells and incubated overnight in the dark at 4° C. The following day, cell lysates were mixed thoroughly, and DNA fluorescence was measured with a Wallac Victor² plate reader (Turku, Finland) set at an excitation frequency of 485 nm and measuring emission at 535 nm.

[0216] Three different siRNAs were tested for each target gene. The average fluorescence units from three replicate wells, representing the amount of DNA per well, were used to determine the effect on growth inhibition. The results are given in Table 10 (energy and metabolism gene targets) and Table 11 (transporter gene targets).

TABLE 10
Effect of siRNA-mediated RNAi on growth of A549 cells (energy and
metabolism gene targets)

| | | | Antisense | Antisense | Growth |
|---|---|---|---|---|---|
| | | SEQ ID NO: of | DNA | RNA | Inhibition |
| | Target gene | target poly- | SEQ ID | SEQ ID | in A549 |
| Target gene | nomenclature | nucleotide | NO: | NO: | cells |
| Hypoxia | ARNT | 3 | 4806 | 5112 | − |
| induced factor 1 | | | 4807 | 5113 | + |
| beta | | | 4808 | 5114 | − |
| Hexose-6- | H6PD | 14 | 4809 | 5115 | ++ |
| phosphate | | | 4810 | 5116 | − |
| dehydrogenase | | | 4811 | 5117 | − |
| (G6PDH) | | | | | |
| Hexokinase II | HK-II | 5 | 4812 | 5118 | − |
| | | | 4813 | 5119 | ++ |
| | | | 4814 | 5120 | − |
| Lactate | LDHA/5 | 9 | 4815 | 5121 | − |
| dehydrogenase 5 | | | 4816 | 5122 | + |
| | | | 4817 | 5123 | − |
| Phosphofructo- | PFKL | 11 | 4818 | 5124 | − |
| kinase 1 - liver | | | 4819 | 5125 | − |
| | | | 4820 | 5126 | − |
| Phosphate | PRPS1 | 18 | 4821 | 5127 | − |
| ribosyl | | | 4822 | 5128 | − |
| pyrophosphate | | | 4823 | 5129 | + |
| synthase | | | | | |
| Carbamoyl | CPS1 | 20 | 4824 | 5130 | ++ |
| phosphate | | | 4825 | 5131 | − |
| synthetase 1 | | | 4826 | 5132 | − |
| Carbamoyl | CAD | 21 | 4827 | 5133 | + |
| phosphate | | | 4828 | 5134 | − |
| synthetase 2 | | | 4829 | 5135 | + |
| Ribonucleotide | RRM1 | 22 | 4830 | 5136 | ++ |
| reductase | | | 4831 | 5137 | ++ |
| subunit 1 | | | 4832 | 5138 | ++ |
| Thymidylate | TYMS | 23 | 4833 | 5139 | + |
| synthase | | | 4834 | 5140 | ++ |
| | | | 4835 | 5141 | ++ |
| Dihydrofolate | DHFR | 25 | 4836 | 5142 | + |
| reductase | | | 4837 | 5143 | − |
| | | | 4838 | 5144 | + |
| Adenylate | AK1 | 26 | 4839 | 5145 | − |
| kinase | | | 4840 | 5146 | + |
| | | | 4841 | 5147 | − |
| NAD synthase | NADSYN | 27 | 4842 | 5148 | + |
| | | | 4843 | 5149 | − |
| | | | 4844 | 5150 | − |
| FAD synthase | FLAD1 | 28 | 4845 | 5151 | + |
| | | | 4846 | 5152 | − |
| | | | 4847 | 5153 | − |
| Cytochrome | COX5A | 31 | 4848 | 5154 | ++ |
| oxidase | | | 4849 | 5155 | − |
| | | | 4850 | 5156 | − |
| ATP synthase | ATP5B | 32 | 4851 | 5157 | − |
| | | | 4852 | 5158 | − |
| | | | 4853 | 5159 | + |
| Fatty acid | FASN | 36 | 4854 | 5160 | − |
| synthase | | | 4855 | 5161 | + |
| | | | 4856 | 5162 | − |
| ATP citrate | ACLY | 37 | 4857 | 5163 | + |
| lyase | | | 4858 | 5164 | − |
| | | | 4859 | 5165 | − |
| ANT2 | SLC25A5 | 34 | 4860 | 5166 | + |
| | | | 4861 | 5167 | − |
| | | | 4862 | 5168 | − |
| ANT3 | SLC25A6 | 35 | 4863 | 5169 | ++ |
| | | | 4864 | 5170 | − |
| | | | 4865 | 5171 | − |
| Cytochrome | UQCRC2 | 30 | 4866 | 5172 | − |
| reductase | | | 4867 | 5173 | − |
| | | | 4868 | 5174 | + |
| Ribonucleotide | RRM2 | 38 | 5306 | 5303 | ++ |
| reductase | | | 5307 | 5304 | ++ |
| subunit 2 | | | 5308 | 5305 | ++ |
| Ribonucleotide | RRM2B | 39 | 4872 | 5175 | − |
| reductase p53 | | | 4873 | 5176 | − |
| inducible | | | 4874 | 5177 | − |
| CTP synthase | CTPS | 40 | 4875 | 5178 | ++ |
| | | | 4876 | 5179 | − |
| | | | 4877 | 5180 | + |
| Inosine | IMPDH2 | 41 | 4878 | 5181 | − |
| monophosphate | | | 4879 | 5182 | ++ |
| dehydrogenase 2 | | | 4880 | 5183 | + |
| Deoxycytidine | DCK | 42 | 4986 | 5281 | − |
| kinase | | | 4987 | 5282 | − |
| | | | 4988 | 5283 | − |
| Thymidine | TK1 | 43 | 4989 | 5284 | − |
| kinase 1 | | | 4990 | 5285 | − |
| | | | 4991 | 5286 | − |
| Thymidine | TK2 | 44 | 4992 | 5287 | − |
| kinase 2 | | | 4993 | 5288 | − |
| | | | 4994 | 5289 | − |
| Deoxy- | DGUOK | 45 | 4995 | 5290 | − |
| guanosine | | | 4996 | 5291 | − |
| kinase | | | 4997 | 5292 | + |
| Uridine | UMPS | 46 | 4998 | 5293 | − |
| monophosphate | | | 4999 | 5294 | + |
| synthase | | | 5000 | 5295 | − |
| Dihydro- | DPYD | 47 | 5001 | 5296 | − |
| pyrimidine | | | 5002 | 5297 | − |
| dehydrogenase | | | 5003 | 5298 | − |

−: no growth inhibition with any siRNA
+: inhibits by at least 50%
++: inhibits by at least 75%

TABLE 11
Effect of siRNA-mediated RNAi on growth of A549 or SK-Mel-5 cells
(transporter gene targets)

| | | | Antisense | Antisense | Growth |
|---|---|---|---|---|---|
| | | SEQ ID NO: | DNA | RNA | Inhibition in |
| | Target gene | of target | SEQ ID | SEQ ID | A549 cells by |
| Target gene | nomenclature | polynucleotide | NO: | NO: | 10 nM siRNA |
| GLUT1 | SLC2A1 | 48 | 4892 | 5187 | + |
| | | | 4893 | 5188 | ++ |
| | | | 4894 | 5189 | − |
| GLUT5 | SLC2A5 | 50 | 4895 | 5190 | − |
| | | | 4896 | 5191 | − |
| | | | 4897 | 5192 | ++ |
| GLUT12 | SLC2A12 | 51 | 4898 | 5193 | − |
| | | | 4899 | 5194 | − |
| | | | 4900 | 5195 | − |
| ENT1 | SLC29A1 | 52 | 4931 | 5226 | ++ |
| | | | 4932 | 5227 | − |
| | | | 4933 | 5228 | + |
| ENT2 | SLC29A2 | 53 | 4934 | 5229 | − |
| | | | 4935 | 5230 | − |
| | | | 4936 | 5231 | − |
| ASCT2 | SLC1A5 | 60 | 4889 | 5184 | − |
| | | | 4890 | 5185 | − |
| | | | 4891 | 5186 | − |
| 4Fhc; CD98 | SLC3A2 | 61 | 4907 | 5202 | − |
| | | | 4908 | 5203 | ++ |
| | | | 4909 | 5204 | − |
| LAT1 | SLC7A5 | 63 | 4901 | 5196 | − |
| | | | 4902 | 5197 | + |
| | | | 4903 | 5198 | − |
| xCT | SLC7A11 | 64 | 4904 | 5199 | − |
| | | | 4905 | 5200 | ++ |
| | | | 4906 | 5201 | − |
| SMVT1 | SLC5A6 | 68 | 4910 | 5205 | − |
| | | | 4911 | 5206 | − |
| | | | 4912 | 5207 | − |
| ThTr1 | SLC19A2 | 70 | 4913 | 5208 | − |
| | | | 4914 | 5209 | ND |
| | | | 4915 | 5210 | ND |
| SVCT2 | SLC23A2 | 73 | 4916 | 5211 | − |
| | | | 4917 | 5212 | − |
| | | | 4918 | 5213 | − |
| CIC | SLC25A1 | 74 | 4925 | 5220 | − |
| | | | 4926 | 5221 | ++ |
| | | | 4927 | 5222 | − |
| DIC | SLC25A10 | 75 | 4928 | 5223 | ++ |
| | | | 4929 | 5224 | − |
| | | | 4930 | 5225 | − |
| NHE1 | SLC9A1 | 76 | 4919 | 5214 | + |
| | | | 4920 | 5215 | − |
| | | | 4921 | 5216 | − |
| MCT1 | SLC16A1 | 77 | 4922 | 5217 | + |
| | | | 4923 | 5218 | − |
| | | | 4924 | 5219 | ++ |
| PMCA1 | ATP2B1 | 78 | 4937 | 5232 | − |
| | | | 4938 | 5233 | − |
| | | | 4939 | 5234 | − |
| PMCA2 | ATP2B2 | 79 | 4940 | 5235 | ++ |
| | | | 4941 | 5236 | + |
| | | | 4942 | 5237 | − |
| PMCA3 | ATP2B3 | 80 | 4943 | 5238 | − |
| | | | 4944 | 5239 | − |
| | | | 4945 | 5240 | + |
| PMCA4 | ATP2B4 | 81 | 4946 | 5241 | − |
| | | | 4947 | 5242 | − |
| | | | 4948 | 5243 | − |
| ATP6V1A | ATP6V1A | 82 | 4949 | 5244 | − |
| (H⁺ ATPase) | | | 4950 | 5245 | − |
| | | | 4951 | 5246 | + |
| ATP6V1B2 | ATP6V1B2 | 83 | 4952 | 5247 | − |
| (H⁺ ATPase | | | 4953 | 5248 | ++ |
| lysosomal | | | 4954 | 5249 | − |
| 70 kDa, V1 | | | | | |
| subunit A) | | | | | |
| ATP6V1C1 | ATP6V1C1 | 84 | 4955 | 5250 | − |
| (H⁺ ATPase | | | 4956 | 5251 | − |
| lysosomal | | | 4957 | 5252 | − |
| 42 kDa, V1 | | | | | |
| subunit C1) | | | | | |
| ATP6V1E1 | ATP6V1E1 | 85 | 4958 | 5253 | − |
| (H⁺ ATPase | | | 4959 | 5254 | − |
| lysosomal | | | 4960 | 5255 | − |
| 31 kDa, V1 | | | | | |
| subunit E1) | | | | | |
| ATP6V1F | ATP6V1F | 86 | 4961 | 5256 | − |
| (H⁺ ATPase | | | 4962 | 5257 | − |
| lysosomal | | | 4963 | 5258 | − |
| 14 kDa, V1 | | | | | |
| subunit F) | | | | | |
| ATP7A | ATP7A | 87 | 4964 | 5259 | − |
| (Cu²⁺ ATPase, | | | 4965 | 5260 | − |
| alpha | | | 4966 | 5261 | − |
| polypeptide) | | | | | |
| ATP7B | ATP7B | 88 | 4967 | 5262 | + |
| (Cu²⁺ ATPase, | | | 4968 | 5263 | − |
| beta | | | 4969 | 5264 | − |
| polypeptide) | | | | | |
| Multidrug | ABCC4 | 90 | 4970 | 5265 | − |
| resistance | | | 4971 | 5266 | − |
| protein 4 | | | 4972 | 5267 | − |
| (MRP4) | | | | | |
| Multidrug | ABCC5 | 91 | 4973 | 5268 | − |
| resistance | | | 4974 | 5269 | + |
| protein 5 | | | 4975 | 5270 | ++ |
| (MRP5) | | | | | |
| ABC | ABCB1 | 89 | 4976 | 5271 | − |
| transporter 1; | | | 4977 | 5272 | − |
| MDR-1 | | | 4978 | 5273 | − |
| | | | 4979 | 5274 | − |
| | | | 4980 | 5275 | − |

−: no growth inhibition
+: inhibits by at least 50%
++: inhibits by at least 75%

Effect of siNA-mediated RNAi on Level of mRNA on Target Transcript in A549 Cells

[0217] A549 cells were transfected as described before with 0.1, 1.0 and 10 nM siRNA as listed in Tables 10 and 11 and the relative mRNA levels quantified 24 h post-transfection. RNA was purified from cells using Trizol® extraction as per the manufacturer's protocol (Invitrogen). cDNA was prepared by digesting approximately 200 ng purified RNA with DNAse I (Invitrogen) for 15 minutes at room temperature, followed by 15 minutes at 65° C. in the presence of 25 mM EDTA. 30 ng random primers were added and incubated for 10 minutes at 65° C., 1 minute on ice; Superscript® III polymerase (Invitrogen) was added in presence of 5 nM DTT (Invitrogen) and 1 mM deoxyribonucleotides (Invitrogen), and the reaction incubated at 25° C. for 5 minutes, followed by an hour at 50° C. cDNA was diluted 1:3 in 10 mM Tris pH 7.0, and quantitative RT-PCR carried out on an ABI Prism 7900HT (Applied Biosciences, Inc., Foster City, Calif.) using FastStart TaqMan SYBRGreen (Roche, Basel, Switzerland) or Platinum SYBR Green (Invitrogen) and 360 nM of the primers specific for gene targets and housekeeping genes HPRT and Lamin. Reduction in target mRNA levels following siRNA transfection are given in Tables 12 and 13, together with the gene specific primer sequences. Primer sequences used for the housekeeping genes HPRT and Lamin are given in SEQ ID NO: 4885-4888.

TABLE 12
Effect of siRNA-mediated RNAi on level of mRNA on energy and
metabolism gene target transcripts in A549 cells

| | RT-PCR | Antisense | Antisense | | | |
|---|---|---|---|---|---|---|
| | primers | DNA | RNA | | | |
| | SEQ ID | SEQ ID | SEQ ID | | | 10 |
| Target gene | NO: | NO: | NO: | 0.1 nM | 1 nM | nM |
| ARNT | 5004; | 1686 | 5112 | − | − | ND |
| | 5005 | 1687 | 5113 | − | − | ND |
| | | 1688 | 5114 | + | ++ | ND |
| H6PD | 5006; | 1689 | 5115 | − | ++ | ND |
| | 5007 | 1690 | 5116 | ++ | ++ | ND |
| | | 1691 | 5117 | − | ++ | ND |
| HK-II | 5008; | 1692 | 5118 | − | − | ND |
| | 5009 | 1693 | 5119 | − | − | ND |
| | | 1694 | 5120 | − | − | ND |
| LDHA-5 | 5010; | 1695 | 5121 | ++ | ++ | ND |
| | 5011 | 1696 | 5122 | − | − | ND |
| | | 1697 | 5123 | ++ | + | ND |
| PFKL | 5012; | 1698 | 5124 | + | + | ND |
| | 5013 | 1699 | 5125 | − | ++ | ND |
| | | 1700 | 5126 | + | ++ | ND |
| PRPS1 | 5014; | 3533 | 5127 | − | ++ | ND |
| | 5015 | 3534 | 5128 | ++ | ++ | ND |
| | | 3535 | 5129 | ++ | +++ | ND |
| CPS1 | 5016; | 3536 | 5130 | ++ | +++ | +++ |
| | 5017 | 3537 | 5131 | ++ | +++ | +++ |
| | | 3538 | 5132 | ++ | ++ | +++ |
| CAD | 5018; | 3539 | 5133 | − | − | − |
| | 5019 | 3540 | 5134 | − | − | − |
| | | 3541 | 5135 | − | − | − |
| RRM1 | 5881; | 3542 | 5136 | + | ++ | ND |
| | 5882 | 3543 | 5137 | ++ | ++ | ND |
| | | 3544 | 5138 | ++ | ++ | ND |
| TYMS | 5020; | 3545 | 5139 | ++ | ++ | +++ |
| | 5021 | 3546 | 5140 | + | ++ | +++ |
| | | 3547 | 5141 | ++ | ++ | +++ |
| DHFR | 5022; | 3548 | 5142 | ++ | ++ | +++ |
| | 5023 | 3549 | 5143 | + | +++ | ++ |
| | | 3550 | 5144 | ++ | ++ | +++ |
| AK1 | 5024; | 3551 | 5145 | ++ | − | ND |
| | 5025 | 3552 | 5146 | + | ++ | ND |
| | | 3553 | 5147 | ++ | ++ | ND |
| NADSYN | 5026; | 3554 | 5148 | ++ | ++ | ND |
| | 5027 | 3555 | 5149 | ++ | ++ | ND |
| | | 3556 | 5150 | ++ | ++ | ND |
| FLAD1 | 5028; | 3557 | 5151 | ++ | ++ | ND |
| | 5029 | 3558 | 5152 | − | ++ | ND |
| | | 3559 | 5153 | ++ | ++ | ND |
| COX5A | 5030; | 3560 | 5154 | ++ | ++ | ND |
| | 5031 | 3561 | 5155 | + | ++ | ND |
| | | 3562 | 5156 | ++ | +++ | ND |
| ATP5B | 5032; | 3563 | 5157 | ++ | +++ | ND |
| | 5033 | 3564 | 5158 | ++ | +++ | ND |
| | | 3565 | 5159 | ++ | +++ | ND |
| SLC25A5 | 5036; | 3572 | 5166 | + | ++ | ND |
| | 5037 | 3573 | 5167 | ++ | +++ | ND |
| | | 3574 | 5168 | ++ | +++ | ND |
| SLC25A6 | 5038; | 3575 | 5169 | +++ | +++ | ND |
| | 5039 | 3576 | 5170 | +++ | +++ | ND |
| | | 3577 | 5171 | ++ | +++ | ND |
| UQCRC2 | 5040; | 3578 | 5172 | + | ++ | ND |
| | 5041 | 3579 | 5173 | ++ | +++ | ND |
| | | 3580 | 5174 | ++ | ++ | ND |
| RRM2 | 4883; | 5306 | 5303 | ++ | + | ND |
| | 4884 | 5307 | 5304 | + | ++ | ND |
| | | 5308 | 5305 | ++ | ++ | ND |
| RRM2B | 5042; | 3584 | 5175 | ++ | ++ | ND |
| | 5043 | 3585 | 5176 | ++ | ++ | ND |
| | | 3586 | 5177 | ++ | +++ | ND |
| CTPS | 5044; | 3592 | 5178 | − | + | ND |
| | 5045 | 3593 | 5179 | − | + | ND |
| | | 3594 | 5180 | − | + | ND |
| IMPDH2 | 5046; | 3595 | 5181 | + | ++ | ND |
| | 5047 | 3596 | 5182 | + | ++ | ND |
| | | 3597 | 5183 | + | ++ | ND |

−: <50% mRNA knockdown
+: 50-70% mRNA knockdown
++: 70-90% mRNA knockdown
+++: >90% mRNA knockdown
ND: Not determined

TABLE 13
Effect of siRNA-mediated RNAi on level of mRNA on transporter gene
target transcript in A549 cells

| | RT-PCR | Antisense | | | | |
|---|---|---|---|---|---|---|
| | primers | DNA | Antisense | | | |
| | SEQ ID | SEQ ID | RNA | | | |
| Target gene | NO: | NO: | SEQ ID NO: | 0.1 nM | 1 nM | 10 nM |
| SLC2A1; GLUT1 | 5048; 5049 | 4892 | 5187 | − | − | ND |
| | | 4893 | 5188 | − | − | ND |
| | | 4894 | 5189 | − | ++ | ND |
| SLC2A5; GLUT5 | 5050; 5051 | 4895 | 5190 | ++ | ++ | ND |
| | | 4896 | 5191 | − | − | ND |
| | | 4897 | 5192 | +++ | +++ | ND |
| SLC2A12; GLUT12 | 5052; 5053 | 4898 | 5193 | +++ | +++ | ND |
| | | 4899 | 5194 | ++ | ++ | ND |
| | | 4900 | 5195 | ++ | ++ | ND |
| SLC29A1; ENT1 | 5054; 5055 | 4931 | 5226 | ++ | ++ | +++ |
| | | 4932 | 5227 | ++ | ++ | ++ |
| | | 4933 | 5228 | − | ++ | ++ |
| SLC29A2; ENT2 | 5056; 5057 | 4934 | 5229 | + | − | ND |
| | | 4935 | 5230 | + | + | ND |
| | | 4936 | 5231 | − | − | ND |
| SLC1A5; ASCT2 | 5058; 5059 | 4889 | 5184 | ++ | ++ | ND |
| | | 4890 | 5185 | ++ | ++ | ND |
| | | 4891 | 5186 | ++ | ++ | ND |
| SLC3A2; 4Fhc | 5060; 5061 | 4907 | 5202 | − | − | ND |
| | | 4908 | 5203 | − | + | ND |
| | | 4909 | 5204 | + | ++ | ND |
| SLC7A5; LAT1 | 5062; 5063 | 4901 | 5196 | ++ | ++ | ND |
| | | 4902 | 5197 | ++ | ++ | ND |
| | | 4903 | 5198 | ++ | +++ | ND |
| SLC7A11; xCT | 5064; 5065 | 4904 | 5199 | + | ++ | ND |
| | | 4905 | 5200 | ++ | ++ | ND |
| | | 4906 | 5201 | + | ++ | ND |
| SLC5A6; SMVT1 | 5066; 5067 | 4910 | 5205 | − | + | ND |
| | | 4911 | 5206 | ++ | ++ | ND |
| | | 4912 | 5207 | + | + | ND |
| SLC19A2; ThTr1 | 5068; 5069 | 4913 | 5208 | ++ | ++ | ND |
| | | 4914 | 5209 | ++ | +++ | ND |
| | | 4915 | 5210 | ++ | ++ | ND |
| SLC23A2; SVCT2 | 5070; 5071 | 4916 | 5211 | ++ | ++ | ND |
| | | 4917 | 5212 | ++ | ++ | ND |
| | | 4918 | 5213 | ++ | ++ | ND |
| SLC25A1; CIC | 5072; 5073 | 4925 | 5220 | ++ | ++ | ND |
| | | 4926 | 5221 | ++ | ++ | ND |
| | | 4927 | 5222 | ++ | ++ | ND |
| SLC25A10; DIC | 5074; 5075 | 4928 | 5223 | ++ | ++ | ND |
| | | 4929 | 5224 | − | + | ND |
| | | 4930 | 5225 | ++ | ++ | ND |
| SLC9A1; NHE1 | 5076; 5077 | 4919 | 5214 | ++ | ++ | ND |
| | | 4920 | 5215 | ++ | ++ | ND |
| | | 4921 | 5216 | ++ | ++ | ND |
| SLC16A1; MCT1 | 5078; 5079 | 4922 | 5217 | + | ++ | +++ |
| | | 4923 | 5218 | + | ++ | +++ |
| | | 4924 | 5219 | + | ++ | ++ |
| ATP2B1; PMCA1 | 5080; 5081 | 4937 | 5232 | ++ | ++ | ND |
| | | 4938 | 5233 | + | ++ | ND |
| | | 4939 | 5234 | + | ++ | ND |
| ATP2B4; PMCA4 | 5086; 5087 | 4946 | 5241 | ++ | ++ | ND |
| | | 4947 | 5242 | ++ | ++ | ND |
| | | 4948 | 5243 | − | ++ | ND |
| ATP6V1B2 | 5090; 5091 | 4952 | 5247 | − | + | ND |
| | | 4953 | 5248 | − | + | ND |
| | | 4954 | 5249 | + | + | ND |
| ATP6V1C1 | 5092; 5093 | 4955 | 5250 | + | ++ | ND |
| | | 4956 | 5251 | ++ | ++ | ND |
| | | 4957 | 5252 | ++ | ++ | ND |
| ATP6V1E1 | 5094; 5095 | 4958 | 5253 | + | ND | ND |
| | | 4959 | 5254 | − | ++ | ND |
| | | 4960 | 5255 | − | + | ND |
| ATP6V1F | 5096; 5097 | 4961 | 5256 | ++ | ++ | ND |
| | | 4962 | 5257 | − | + | ND |
| | | 4963 | 5258 | ++ | ++ | ND |
| ATP7A | 5098; 5099 | 4964 | 5259 | − | − | ND |
| | | 4965 | 5260 | − | − | ND |
| | | 4966 | 5261 | − | − | ND |
| ATP7B | 5100; 5101 | 4967 | 5262 | − | − | ND |
| | | 4968 | 5263 | − | ++ | ND |
| | | 4969 | 5264 | − | ++ | ND |
| ABCC4; MRP4 | 5102; 5103 | 4970 | 5265 | ++ | ++ | ND |
| | | 4971 | 5266 | − | ++ | ND |
| | | 4972 | 5267 | − | ++ | ND |
| ABCC5; MRP5 | 5104; 5105 | 4973 | 5268 | − | − | ND |
| | | 4974 | 5269 | − | + | ND |
| | | 4975 | 5270 | − | + | ND |
| ABCB1; MDR1 | 5106; 5107 | 4976 | 5271 | − | − | ND |
| | | 4977 | 5272 | − | − | ND |
| | | 4978 | 5273 | − | − | ND |
| | | 4979 | 5274 | ND | ND | ND |
| | | 4980 | 5275 | ND | ND | ND |

−: <50% mRNA knockdown
+: 50-70% mRNA knockdown
++: 70-90% mRNA knockdown
+++: >90% mRNA knockdown
ND: Not determined

### EXAMPLE 11

### Effect of siRNA-Mediated Inhibition of Gene Expression on Tumor Growth of Transfection of Cells Pre-Implantation

[0218] To determine the effect of siRNA-mediated knockdown of HK-II, CAD, IMPDH2, RRM2, SLC16A1 and SLC29A1 on tumor growth, A549 cells (human lung cancer cell line; ATCC No. CCL-185) were reverse-transfected prior to implantation in CD-1 nude mice as described above with siRNAs given in SEQ ID NO: 5307 (DNA), and SEQ ID NO: 5304 (RNA) for RRM2, SEQ ID NO: 4932 (DNA), and SEQ ID NO: 5227 (RNA) for ENT1, SEQ ID NO: 4813 (DNA), and SEQ ID NO: 5119 (RNA) for HK-II, SEQ ID NO: 4827 (DNA), and SEQ ID NO: 5133 (RNA) for CAD, SEQ ID NO: 4879 (DNA), and SEQ ID NO: 5182 (RNA) for IMPDH2 and SEQ ID NO: 4924 (DNA), and SEQ ID NO: 5219 (RNA) for SLC16A1, respectively. The siRNA given in SEQ ID NO: 4804 (DNA), and SEQ ID NO: 5301 (RNA) was used as control.

[0219] In two separate experiments, CD-1 mice were divided into five groups that received untransfected A549 cells, cells transfected with control siRNA or three different siRNAs (as listed above), respectively. Cells were transfected in vitro using the method as described in Example 8, and 24 h after transfection, s.c. inoculated into mice. Tumor growth was measured 3 times per week. In the first experiment, mice received cells transfected with siRNA targeting RRM2, HK-II or SLC29A1 and were monitored for 33 days. In the second experiment, mice received cells transfected with siRNA targeting CAD, IMPDH2 or SLC16A1, and were monitored for 26 days. Preliminary data showed no significant difference in tumor growth rate between the two control groups in each experiment. Thirty-three days after the cell inoculation, the average tumor size resulting from RRM2 siRNA inoculation (100.1±116.6 mm³) was significantly smaller than those of the tumors resulting from inoculation with untransfected cells (164.8±18.6 mm³; P<0.01) and the control siRNA transfectants (172.3±36.1 mm³; P<0.01). Similarly, preliminary data indicated tumor growth rate was reduced for the groups receiving cells transfected with siRNA targeting CAD and SLC16A1. Twenty-six days after cell inoculation, the tumor volume for mice with cells transfected with siRNA targeting CAD or SLC16A1 was 97.2±7.3 mm³ or 110.1±28.1 mm³, respectively. These tumor masses were significantly smaller than those resulting from untransfected cells (133.9±21.1 mm³, P<0.01 for CAD and P<0.05 for SLC16A1) and the control siRNA-treated cells (154.3±23.7 mm³, P<0.01 for CAD and P<0.05 for SLC16A1). No tumor growth inhibition was seen in mice that received cells transfected with siRNA targeting HK-II, SLC29A1 or IMPDH2 as compared to the control groups.

### EXAMPLE 12

### siRNA-Mediated Inhibition of YBX1 Gene Expression

[0220] siRNA-mediated inhibition of cancer cell growth using siRNA targeting the YBX1 gene (SEQ ID NO: 92) was determined as follows. SK-MeI-5 cells were cultured in RPMI 1640 medium with 10% v/v heat-inactivated fetal calf serum. Cells were cultured as described above and reverse transfected with 0.1, 1.0, 10 and 40 nM (final concentration) of a pool of YBX1-targeting siRNAs (SEQ ID NO: 4982 and 4983 (DNA), and SEQ ID NO: 5277 and 5278 (RNA); referred to as 994 and 995 in FIG. 19) or a non-specific control (SEQ ID NO: 4804 (DNA), and SEQ ID NO: 5301 (RNA); referred to as Stealth 81 ctrl in FIG. 19), and cell growth determined after 120 h by measuring DNA fluorescence with a Wallac Victor² plate reader (Turku, Finland) set at an excitation frequency of 485 nm and measuring emission at 535 nm. Growth inhibition by the siRNAs is shown in FIG. 19. Growth inhibition by the siRNA pool was standardized against the inhibition obtained with the control siRNAs.

[0221] siRNA-mediated RNAi was also determined on a panel of different cell lines. A549, SK-MeI-5, wt HCT-116, HCT-116−/−p53 and MCF-7 cells were transfected with 10 nM siRNAs targeting YBX-1 and growth inhibition determined as described above. The YBX1 siRNAs are given in SEQ ID NO: 4981 to 4985 (DNA) and SEQ ID NO: 5276-5280 (RNA). A non-specific siRNA (SEQ ID NO: 4804 (DNA) and SEQ ID NO: 5301 (RNA)) was used as control. Growth inhibition by the siRNAs, given in Table 14, was standardized against the inhibition obtained with the control siRNA.

TABLE 14
Effect of YBX-1 siRNA-mediated RNAi on growth of a panel of cancer
cell lines

| Antisense | Antisense | | SK- | | HCT-116 | |
|---|---|---|---|---|---|---|
| DNA SEQ | RNA SEQ | A549 | Mel- | wt HCT- | −/−p53 | MCF7 |
| ID NO: | ID NO: | cells | 5 cells | 116 cells | cells | cells |
| 4981 | 5276 | + | ++ | ND | ND | ND |
| 4982 | 5277 | +++ | +++ | +++ | +++ | ++ |
| 4983 | 5278 | + | ++ | ND | ND | ND |
| 4984 | 5279 | ++** | +++ | +* | +* | ND |
| 4985 | 5280 | +** | ++ | −* | −* | ND |

−: No inhibition
+: At least 20% inhibition
++: At least 50% inhibition
+++: At least 70% inhibition
**by 5 nM siRNA
*by 1 nM siRNA
ND: Not done

Effect of siRNA Knockdown on YBX1 mRNA Level

[0222] A549 cells were transfected with 0.1, 1.0 and 10 nM siRNA (given in SEQ ID NO: 4981 to 4985 (DNA), and SEQ ID NO: 5276-5280 (RNA)) and the relative mRNA levels quantified 24 h post-transfection as described in Example 8. Reduction in mRNA levels achieved is given in Table 15.

TABLE 15
YBX1-specific reduction of mRNA levels in A549 cells

| | RT-PCR | Antisense | Antisense | | | |
|---|---|---|---|---|---|---|
| Target | primers SEQ | DNA SEQ | RNA SEQ | | | |
| gene | ID NO: | ID NO | ID NO | 0.1 nM | 1 nM | 10 nM |
| YBX1 | 5108; 5109 | 4981 | 5276 | ND | ND | ++ |
| | | 4982 | 5277 | ND | +++ | +++ |
| | | 4983 | 5278 | ND | ND | ++ |
| | | 4984 | 5279 | +++ | +++ | +++ |
| | | 4985 | 5280 | + | ++ | ++ |

+: At least 20% inhibition
++: At least 50% inhibition
+++: At least 70% inhibition
ND: Not done

Effect of siRNA Knockdown on YBX1 Protein Levels

[0223] Cell lysates were prepared from A549 cells 24 h post-transfection with 10 nM YBX1-specific siRNA (SEQ ID NO: 4982 (DNA), and SEQ ID NO: 5277 (RNA) was labeled 94; SEQ ID NO: 4983 (DNA), and SEQ ID NO: 5278 (RNA) was labeled 95) or control siRNA (SEQ ID NO: 4804 (DNA), and SEQ ID NO: 5301 (RNA); labeled 81). Following Western blotting onto Immobilon-P PVDF filer (Millipore, Bedford Mass.), membranes were probed with a goat anti-human polyclonal antibody specific for YBX1 (AbCam plc, Cambridge, UK), at a concentration of 0.4 mg/ml. HRP-conjugated donkey anti-goat IgG (80 mg/ml; Santa Cruz) was used as a secondary antibody, and signal was detected with an ECL Plus Western blotting Detection System (GE Healthcare, UK) using a Typhoon Scanner (Molecular Dynamics, GE Healthcare, UK). FIG. 20 shows siRNA-mediated reduction in YBX1 (p47) and p37 protein levels in the cells compared with the control siRNA.

Effect siRNA-Mediated Inhibition of YBX1 Gene Expression in A549 SK-MeI-5 and HCT-116−/−p53 Cells Grown in Hypoxic Versus Normoxic Conditions

[0224] A549, SK-MeI-5 and HCT-116−/−p53 cells were cultured in RPMI 1640 medium with 10% v/v heat-inactivated fetal calf serum. In a 96-well plate, 1,500 cells were reverse transfected using Lipofectamine™ RNAiMAX transfection reagent with 1.0 nM (final concentration) of YBX1-targeting siRNAs labeled 994, 856 and 931 (SEQ ID NO: 4982, 4984 and 4985 (DNA), and SEQ ID NO: 5277, 5279 and 5280 (RNA), respectively) or a non-specific control (81c; SEQ ID NO: 4804 (DNA), and SEQ ID NO: 5301 (RNA)). After incubating the cells for 24 h, the transfection media were replaced with 150 μl fresh cRPMI supplemented with 10% FBS, 0.05 mM 2-Mercaptoethanol, and containing PSG (160 μM penicillin, 70 μM streptomycin, 20 μM L-glutamine). For the hypoxic treatment, plates were placed into an anoxic chamber, flushed with 5% CO₂/95% N at 20 litres/min for 4 minutes (80 litres total), sealed and replaced into an incubator at 37° C., 5% CO₂, until harvesting. The flush was repeated once more after 24 h to remove any residual O₂. For the normoxic treatment, plates were incubated in a humidified box in an incubator at 37° C., 5% CO₂ until harvesting.

[0225] At 120 h following reverse transfection (96 h in hypoxic conditions), cells were harvested and frozen at −80° C. overnight. Growth inhibition was measured using Syber Green as described above. In FIG. 21, the growth inhibition in A549 cells grown under normoxic and hypoxic conditions by the YBX1-targeting siRNAs is shown.

Effect of Co-Transfection with p53-Targeting siRNA on YBX1 siRNA-Mediated Growth Inhibition

[0226] Transfection of cells (A549, SK-Mel-5, wt HCT-116, HCT-116−/−p53) and determination of growth inhibition were performed as described above using Lipofectamine RNAiMAX, and a YBX1-specific siRNA (given in SEQ ID NO: 4982 (DNA), and SEQ ID NO: 5277 (RNA); 1 nM siRNA for SK-MeI-5 cells and 5 nM siRNA (A549 cells), plus and minus equimolar levels of the p53-targeting Stealth™ siRNA given in SEQ ID NO: 5110 (DNA), and SEQ ID NO: 5299 (RNA). Controls included cells only, mock-transfected cells and a non-specific siRNA control (labeled 81 ctrl; SEQ ID NO: 4804 (DNA), and SEQ ID NO: 5301 (RNA)). Results showed that co-transfection with the p53 duplex completely ablated growth inhibition by the YBX1-specific siRNA in SK-MeI-5 cells (FIG. 22A), but in the A549 (FIG. 22B), wt HCT-116 (FIG. 22C) and HCT-116−/−p53 (FIG. 22D), only partial abrogation of growth inhibition was observed. This could reflect either that a greater concentration of duplex was required to significantly affect p53 levels in the cells used, or that growth inhibition occurred via a p53-independent mechanism.

### EXAMPLE 14

### Increased Drug Toxicity Following siRNA Transfection In Vitro

[0227] The effect of siRNA-mediated transporter knockdown on cancer cell sensitivity to chemotherapeutics was tested as follows. A549, SK-MeI-5 and HCT-15 cells (1.5×10³ cells) were transfected in triplicate in 96-well plates with a final concentration of 40 nM of a pool of three siRNAs targeting SLC1A5, SLC2A1, SLC7A5, SLC29A1, SLC29A2 (siRNA SEQ ID NO: as listed in Table 12), or control siRNA (SEQ ID NO: 4804 (DNA), and SEQ ID NO: 5301 (RNA)). Transfections contained three siRNAs against each individual target (1A5, 7A5, 29A1, 29A2, 2A1) or one siRNA against each of the five targets (pool). Lipofectamine 2000 (Invitrogen) was used as the transfection agent. At 24 h post-transfection, cells were exposed continuously to chemotherapeutics at the concentrations indicated for 72-96 h, at which point plates were harvested by removing medium and freezing at −80° C. The next day, plates were removed and DNA content in wells was quantified with the CyQuant™ cell proliferation kit (Invitrogen). As shown in FIGS. 23A and B, SK-MeI-5 and A549 cells transfected with siRNAs targeting glucose or nucleoside transporters exhibited increased sensitivity to 5FU compared with controls.

[0228] The results obtained for methotrexate are shown in FIG. 24. HCT-15 cells were transfected with 40 nM siRNA against the listed gene targets. Transfections contained three siRNAs against each individual target (SLC2A1 (2A1), SLC29A1 (29A1) and SLC1A5 (1A5)). A pool of control siRNA (SEQ ID NO: 4804 and 4805 (DNA), and SEQ ID NO: 5301 and 5302 (RNA)) was used. Following transfection, cells were exposed to methotrexate (MTX) at the concentration indicated for 4 h, after which medium was replaced and cells were grown for 96 h. DNA content in wells was measured using CyQuant. FIG. 24 shows that, when compared with mock transfected cells or transfection with control siRNA (filled circles and squares, respectively), cells transfected with siRNAs targeting SLC2A1 (open triangles) or SLC29A1 (filled triangles) were more sensitive to methotrexate treatment. The sensitivity of cells transfected with SLC1A5-specific siRNAs (filled diamonds) did not change.

### Effect of MDR1 Knockdown on Drug Resistance

[0229] HCT-15 cells, which express high endogenous levels of MDR1, were reverse transfected with MDR1-specific (SEQ ID NO: 4976 (DNA), and SEQ ID NO: 5271 (RNA)) or control siRNAs (SEQ ID NO: 4804 (DNA), and SEQ ID NO: 5301 (RNA)) at a final concentration of 10 nM. Lipofectamine-siRNA complexes were made by adding 0.3 μl Lipofectamine RNAiMAX in 10 μl RPMI to an equivalent volume of medium containing siRNA, such that the final siRNA concentration would be 10 nM. This mixture was incubated at room temperature for 20 minutes to allow complexes to form, after which time 1,500 HCT-15 cells in 100 μl RPMI supplemented with 10% FCS were added to the wells. After incubation at 37° C. for 24 h, transfection medium was replaced with fresh medium containing a serial dilution of chemotherapeutic drug as indicated in FIG. 22, and cells were exposed continuously to drug for 72 h. Drugs used were Doxorubicin (Sigma, St. Louis Mo.), Paclitaxel (Invitrogen) and Etoposide (Sigma, St. Louis Mo.). At the conclusion of the assay, medium was removed and growth inhibition determined as described above. Cells transfected with the MDR1-targeting siRNA (FIG. 25; filled symbols) became more sensitive to the MDR1 substrates doxorubicin (FIG. 25A), paclitaxel (FIG. 25B), and etoposide (FIG. 25C), compared with control siRNA-transfected cells (FIG. 25A-C; open symbols).

### Effects of TYMS and DHFR Knockdown on Tumor Cell Growth and Sensitivity to 5FU

[0230] HCT-116 and A549 cells were transfected with 0.1, 1.0 and 10 nM siRNA targeting TYMS and DHFR (SEQ ID NO: 4833 to 4838 (DNA), and SEQ ID NO: 5139-5144 (RNA)) using Lipofectamine™ RNAiMAX and incubated for 96 h, in either normal fetal calf serum or serum dialyzed to remove low molecular weight molecules (cut-off 10 kDa). Growth of cells was measured by measuring the total DNA content per well using the SYBR Green assay as described above, and values are given as the percentage of the averaged control values. FIG. 26 shows that knockdown of TYMS and DHFR by three independent siRNAs lead to an inhibition of both HCT-116 and A549 cell growth. Inhibition increased with increasing siRNA concentration, which was not observed with a non-specific control siRNA. This dose-dependent inhibition was potentiated when experiments were carried out in medium supplemented with dialyzed fetal calf serum. FIGS. 26A and B show the effects of knockdown on tumor cell growth and sensitivity to 5FU by TYMS and DHFR siRNA in the presence of normal or dialyzed fetal calf serum in HCT-116 cells, and FIGS. 26C and D show the results obtained in A549 cells.

### Effect of TYMS and DHFR Knockdown on 5FU Toxicity.

[0231] HCT-116 and A549 cells were transfected as described above with 0.1, 1.0 and 10 nM of three TYMS-specific siRNAs, labeled TYMS-1, TYMS-2 and TYM-3 (SEQ ID NO: 4833-4835 (DNA), and SEQ ID NO: 5139-5141 (RNA), or 1.0 and 10 nM control siRNAs (809-ctrl; SEQ ID NO: 4805 (DNA), and SEQ ID NO: 5302 (RNA) and 81ctrl; SEQ ID NO: 4804 (DNA), and SEQ ID NO: 5301 (RNA)). HCT-116 and A549 cells were also similarly transfected with 0.1, 1.0 and 10 nM of three DHFR-specific siRNAs, labeled DHFR-1, DHFR-2 and DHFR-3 (SEQ ID NO: 4836-4838 (DNA), and SEQ ID NO: 5142-5144 (RNA)), or control siRNA (SEQ ID NO: 4805 (DNA), and SEQ ID NO: 5302 (RNA)). Twenty four hours after transfection, cells were exposed to 5FU using a serial dilution starting at 44 μM, in medium containing either 10% normal FCS or 10% dialyzed FCS as described above. 5FU treatment was continuous for 3 days, at which time cell growth was analyzed by measuring DNA content per well using the SYBR Green assay outlined above. As seen in FIGS. 27 and 28, transfection with TYMS siRNA led to a dose-dependent increase in growth inhibition above that caused by the drug alone (control siRNA-transfected cells) in HCT-116 cells (FIGS. 27A-C), and A549 cells (FIGS. 28A-C). This combinatorial inhibitory effect was further increased when experiments were done in medium containing dialyzed FCS (FIGS. 27D-F; FIGS. 28D-F).

[0232] FIGS. 29 and 30 show transfection with DHFR siRNA similarly led to a dose-dependent increase in growth inhibition above that caused by the drug alone (control siRNA-transfected cells) in HCT-116 cells (FIGS. 29A-C), and A549 cells (FIGS. 30A-C). This combinatorial inhibitory effect was further increased when experiments were done in medium containing dialyzed FCS (FIGS. 29D-F; FIGS. 30D-F). The changes in the IC₅₀ value for 5FU in HCT-116 and A549 cells following TYMS knockdown by individual siRNAs are listed in Table 16 below.

TABLE 16
Toxicity of 5FU following TYMS knockdown

| | Antisense | | | |
|---|---|---|---|---|
| siRNA identifier | DNA | Antisense | IC₅₀ value (μM) | |
| and concentration | SEQ ID NO | RNA SEQ ID NO | HCT-116 | A549 |
| TYMS-1 (10 nM) | 4833 | 5139 | 0.09 | 0.14 |
| TYMS-1 (1 nM) | | | 0.09 | 0.11 |
| TYMS-1 (0.1 nM) | | | 0.10 | 0.34 |
| TYMS-2 (10 nM) | 4834 | 5140 | 0.10 | 0.15 |
| TYMS-2 (1 nM) | | | 0.09 | 0.21 |
| TYMS-2 (0.1 nM) | | | 0.41 | 0.59 |
| TYMS-3 (10 nM) | 4835 | 5141 | 0.11 | 0.20 |
| TYMS-3 (1 nM) | | | 0.19 | 0.13 |
| TYMS-3 (0.1 nM) | | | 0.32 | 0.61 |
| 809-ctrl (10 nM) | 4805 | 5302 | 0.60 | 0.64 |
| 809-ctrl (1 nM) | | | 0.60 | 0.67 |
| 809-ctrl (0.1 nM) | | | 0.65 | 0.82 |

### EXAMPLE 15

### siRNA-Mediated Silencing of Expression in Mice

[0233] Human tumor cells can be transplanted into nude mice for use as an animal model of human tumor growth. Tumor growth can be measured in vivo at both the microscopic and macroscopic levels using histopathology and regular measurements of tumor size respectively. Tumor cells can be transfected with siRNA duplexes in vitro, prior to transplantation into host mice; or tumor targeting siRNA duplexes can be injected into the mice (directly into the tumor or systemically) once the tumor cells are established at the injection site (i.e. forming a tumor). Tumor growth over time is measured using calipers; and via histopathology at the end of the study.

[0234] The ability of the inventive compositions to inhibit tumor growth is examined in a mouse model of human tumor development. The extent of tumor growth is reflected in the tumor size over time.

[0235] Nude mice are given human tumor cells by the subcutaneous route at time 0. The injection site is monitored to establish the time of palpable tumor development and ongoing measurements of tumor size are made using calipers once the tumor is palpable. The inventive compositions are administered either directly to the tumor cells (using standard in vitro transfection procedures) prior to transplantation of these cells into host mice; injected directly into the tumor itself, once it is established in the host mice; or intravenously at various times during tumor development. Tumor development is determined and compared to control mice.

[0236] There are a number of model systems using human tumor cells as a means of identifying novel anti-cancer drugs. A reduction in tumor size upon treatment with the inventive compositions indicates that the compositions may be effectively employed in treating cancer.

### EXAMPLE 16

### Uptake of siRNA into Tumor Cells In Vivo

[0237] An Alexa 555-labeled control siRNA was used to determine the cellular uptake of siRNA in tumor tissues when given via intratumoral (i.t.) injection. A549 cells (6−8×10⁶ cells) were s.c. inoculated into CD-1 nude mice. Once the A549 tumors reached a size of approximately 100 mm³, mice were divided into two groups of four mice each. The Alexa 555-labeled Stealth™ siRNA (SEQ ID NO: 5111 (DNA), and SEQ ID NO: 5300 (RNA); Invitrogen Corp.) at a dose of 25 μg (in 50 μl) was injected into tumors of one group. 50 μl PBS was injected into tumors of a negative control group. Tumors were harvested at 6 and 24 h after injection and placed in a labeled cryomold (Tissue-TeK® Crymold®; ProSciTech, Thuringowa, Queensland, Australia) and covered with OCT tissue freezing medium (O.C.T. Compound, ProSciTech). The mold was gently submerged in liquid nitrogen for approximately one minute until OCT turned white and opaque. Tissues were stored at minus 80° C. until sections were cut. Tissues were allowed to reach −20° C. before processing in a Leica Cryostat (Leica Microsystems, Inc., Bannockburn Ill.) at 10 microns. Sections were picked up on Super Frost Plus slides (Esco, Biolab Scientific, New Zealand). After air-drying, sections were fixed in freshly prepared 2% paraformaldehyde solution for 2 minutes at room temperature and then rinsed in PBS to remove the fixative. The slides were mounted in Prolong Gold antifade reagent with DAPI (Molecular Probes®, Invitrogen Corp.), covered with cover slips and sealed to the slides with clear nail polish. The slides were stored at 4° C. in the dark. Fluorescence in the tumor samples was visualized using a Zeiss Axioskop Microscope (Carl Zeiss microimaging, Inc., Thornwood N.Y.) and Leica SP-2 Confocal Microscope (Leica Microsystems, Inc.). Autofluorescence in tumor tissues was very low in all filters examined (green, red and UV). At 6 h after the injection of Alexa 555-labeled siRNA, red punctuations were seen in some tumor cells, indicative of uptake of siRNA. Overlayed images captured from red and UV filters that revealed nuclei from DAPI staining, showed that the red punctuated emissions were located in the cytoplasm around the periphery of the nuclei. It is widely accepted that this pattern of peri-nuclear localization of siRNA is strongly correlated to siRNA knockdown, i.e. RNAi efficiency (Chiu et al., Chem. Biol. 11:1165-1175, 2004; Berezhna et al., Proc. Natl. Acad. Sci. USA 103:7682-7687, 2006). The fluorescent emission from the labeled siRNA was also observed in the samples taken 24 h after injection, although in slightly lower number of cells. The observed emission pattern was absent in tumors injected with PBS.

### EXAMPLE 17

### Suppression of RNAi

[0238] The therapeutic use of siRNA to knockdown target gene production in cancer cells in humans and non-human animals may require rapid reversal. Suppressor proteins from plant viruses are capable of reversing silencing in plant tissues where it is established, and preventing initiation of silencing in new tissues. Plant virus genes encoding suppressor proteins include HC-Pro (Tobacco etch virus), P25 (Potato virus X), 2b (Cucumber mosaic virus), Turnip crinkle virus coat protein, and p19 (Cymbidium ringspot virus).

[0239] Some plant virus silencing suppressor proteins are functional when expressed in cultured Drosophila cells (Reavy and MacFarlane. Scottish Crop Research Institute (SCRI) Annual Report 1000/2001, pp. 120-123). The B2 gene of the flock house virus (FHV), a nodavirus that infects vertebrate and invertebrate hosts, initiates and is a target of RNA silencing in plants and Drosophila cells (Li et al., Science 196:1319-21, 2002). Vaccinia virus and human influenza A, B and C viruses each encode viral suppressors (E3L and NSI) which bind dsRNA and inhibit the mammalian IFN-regulated innate antiviral response (Li et al., Proc. Natl. Acad. Sci. USA 101:1350-1355, 2004).

[0240] The effectiveness of these viral suppressors of RNAi may be evaluated as described above in Examples 6 and 7.

### EXAMPLE 18

### Screening of Candidate Therapeutic siRNA Molecules

[0241] a) In vitro Screening

[0242] siRNA target sequences may be screened in a high-throughput fashion by comparing the gene silencing effect of the target-specific siRNAs with the induction of cell death by known cancer therapeutic drugs in plate-based in vitro assays or using flow cytometry. Potential drugs that may be suitably employed in such methods include, but are not limited to, those provided in Table 17 below. The comparison includes the gene-silencing effect in normal and tumor cells, but also includes a comparison of normal and drug-resistant tumor cells. A comparative assay further includes the gene-silencing effect under aerobic conditions with hypoxia-induced genes turned on or off.

[0243] The ability of siRNAs to downregulate their target sequences may be tested in a model system by co-transfection of a cDNA encoding the target message and the siRNA to be tested as detailed above. Such systems comprise an easily transfectable cell line, e.g., HEK293. The activity of selected siRNA sequences against endogenously expressed target genes may be tested by transfecting primary B cells, mast cells, or cell lines derived from these cell types in vitro using commercially available transfection reagents (for example, Lipofectamine™2000, Invitrogen), electroporation (BTX ECM600), lipid-based complexes without targeting, or more specifically with transferrin receptor- and CD19-specific antibody-liposome complexes containing siRNA.

[0244] A screening sequence could be: (a) siRNA to silence a gene expressed in normal but not tumor cells; (b) siRNA directed to genes expressed in both normal and tumor targets but under the control of a promoter expressed only in tumor cells; (c) siRNA directed to a gene target which has resulted in drug resistance; and (d) siRNA to a hypoxic gene target expressed in tumor cells growing aerobically.

TABLE 17
Cancer Drugs Involved in Inhibition of in vivo Metabolic Pathways

| | Main | RNAi | | Related |
|---|---|---|---|---|
| Drug | action | Target | Information | Cancer(s) |
| Xeloda ® | Inhibition of | Thymidylate | Enzymatically converted to | Metastatic |
| (capecitabine) | DNA | synthetase | 5-fluorouracil (5-FU) in vivo | breast cancer; |
| | synthesis | | | metastatic |
| | | | | colorectal |
| | | | | carcinoma; |
| | | | | metastatic |
| | | | | carcinoma of |
| | | | | the ovary; non- |
| | | | | small cell lung |
| | | | | cancer |
| Fludara ® | Inhibition of | DNA | Fludarabine phosphate is | B-cell |
| (Fludarabine | DNA | polymerase | dephosphorylated to 2- | lymphocytic |
| phosphate) | synthesis | alpha, ribonucleotide | fluoro-ara-A and then | leukemia (CLL) |
| | | reductase or | phosphorylated | |
| | | DNA | intracellularly by | |
| | | primase | deoxycytidine kinase to the | |
| | | | active triphosphate, 2-fluoro- | |
| | | | ara-ATP. This metabolite | |
| | | | appears to act by inhibiting | |
| | | | DNA polymerase alpha, | |
| | | | ribonucleotide reductase and | |
| | | | DNA primase, thus | |
| | | | inhibiting DNA synthesis. | |
| Methotrexate | Inhibits | Dihydrofolic | Inhibits dihydrofolic acid | Breast cancer, |
| | DNA | acid | reductase. Dihydrofolates | epidermoid |
| | synthesis | reductase, | must be reduced to | cancers of the |
| | | thymidylate | tetrahydrofolates by this | head and neck, |
| | | synthetase. | enzyme before they can be | advanced |
| | | | utilized as carriers of one- | mycosis |
| | | | carbon groups in the | fungoides, and |
| | | | synthesis of nucleotides and | lung cancer, |
| | | | thymidylate. Methotrexate | particularly |
| | | | interferes with DNA | squamous cell |
| | | | synthesis, repair, and cellular | and small cell |
| | | | replication. | types stage; |
| | | | | non-Hodgkin's |
| | | | | lymphomas; |
| | | | | non-metastatic |
| | | | | osteosarcoma |
| | | | | meningeal |
| | | | | leukemia |
| Exemestane | Inhibits | Aromatase | An irreversible, steroidal | Breast cancer |
| (Aromasin ®) | aromatase | | aromatase inactivator, | |
| | | | structurally related to the | |
| | | | natural substrate | |
| | | | androstenedione. It acts as a | |
| | | | false substrate for the | |
| | | | aromatase enzyme, and is | |
| | | | processed to an intermediate | |
| | | | that binds irreversibly to the | |
| | | | active site of the enzyme | |
| | | | causing its inactivation, an | |
| | | | effect also known as “suicide | |
| | | | inhibition.” | |
| Aloprim ™ | DNA | Xanthine | Allopurinol is a structural | Leukemia, |
| (allopurinol) | synthesis | oxidase | analogue of the natural | lymphoma, and |
| | | | purine base, hypoxanthine. | solid tumor |
| | | | It is an inhibitor of xanthine | malignancies |
| | | | oxidase, the enzyme | |
| | | | responsible for the | |
| | | | conversion of hypoxanthine | |
| | | | to xanthine and of xanthine | |
| | | | to uric acid, the end product | |
| | | | of purine metabolism in man. | |
| Aromasin ®; | Inhibits | Aromatase | The principal source of | Breast cancer |
| Arimidex ® | aromatase | | circulating estrogens in | |
| (anastrozole); | | | postmenopausal women is | |
| Teslac; | | | from conversion of adrenal | |
| Femara | | | and ovarian androgens | |
| (letrozole); | | | (androstene-dione and | |
| | | | testosterone) to estrogens | |
| | | | (estrone and estradiol) by the | |
| | | | aromatase enzyme in | |
| | | | peripheral tissues. Estrogen | |
| | | | deprivation through | |
| | | | aromatase inhibition is an | |
| | | | effective and selective | |
| | | | treatment for some | |
| | | | postmenopausal patients with | |
| | | | hormone-dependent breast | |
| | | | cancer. | |
| FUDR | Inhibits | Thymidylate | FUdR is rapidly catabolized | Gastrointestinal |
| (fluorouridine) | DNA | synthetase | to 5-fluoro-uracil and | adenocarcinoma |
| | synthesis | (TYMS) | interferes with the synthesis | |
| | | | of DNA and to a lesser | |
| | | | extent inhibit the formation | |
| | | | of RNA. When FUDR is | |
| | | | given by continuous intra- | |
| | | | arterial infusion its direct | |
| | | | anabolism to FUDR- | |
| | | | monophosphate is enhanced, | |
| | | | thus increasing the inhibition | |
| | | | of DNA. | |
| Adrucil ® (5- | Inhibits | TYMS | Fluorouracil interferes with | Carcinoma of |
| Fluorouracil) | DNA | | the synthesis of DNA and to | the colon, |
| | synthesis | | a lesser extent inhibits the | rectum, breast, |
| | | | formation of RNA. The | stomach and |
| | | | effects of DNA and RNA | pancreas. |
| | | | deprivation are most marked | |
| | | | in rapidly growing cells | |
| | | | which take up fluorouracil at | |
| | | | a more rapid rate. | |
| Faslodex ® | Estrogen | Estrogen | Many breast cancers have | Breast cancer |
| (fulvestrant) | receptor | receptor | estrogen receptors (ER), and | |
| | antagonist | | the growth of these tumors | |
| | | | can be stimulated by | |
| | | | estrogen. Fulvestrant is an | |
| | | | estrogen receptor antagonist | |
| | | | that binds to the estrogen | |
| | | | receptor in a competitive | |
| | | | manner with affinity | |
| | | | comparable to that of | |
| | | | estradiol. Fulvestrant down- | |
| | | | regulates the ER protein in | |
| | | | human breast cancer cells. | |
| Gemzar ® | nucleoside | Ribonucleotide | Exhibits cell phase | Non-small cell |
| (gemcitabine | analogue | reductase | specificity, primarily killing | lung cancer; |
| HCl) | that exhibits | | cells undergoing DNA | adenocarcinoma |
| | antitumor | | synthesis (S-phase) and also | of the pancreas |
| | activity | | blocking the progression of | |
| | | | cells through the G1/S-phase | |
| | | | boundary. Gemcitabine is | |
| | | | metabolized intracellularly | |
| | | | by nucleoside kinases to the | |
| | | | active diphosphate | |
| | | | (dFdCDP) and triphosphate | |
| | | | (dFdCTP) nucleosides. The | |
| | | | cytotoxic effect of | |
| | | | gemcitabine is attributed to a | |
| | | | combination of two actions | |
| | | | of the diphosphate and the | |
| | | | triphosphate nucleosides, | |
| | | | which leads to inhibition of | |
| | | | DNA synthesis. First, | |
| | | | gemcitabine diphosphate | |
| | | | inhibits ribonucleotide | |
| | | | reductase, which is | |
| | | | responsible for catalyzing the | |
| | | | reactions that generate the | |
| | | | deoxynucleoside | |
| | | | triphosphates for DNA | |
| | | | synthesis. Inhibition of this | |
| | | | enzyme by the diphosphate | |
| | | | nucleoside causes a | |
| | | | reduction in the | |
| | | | concentrations of | |
| | | | deoxynucleotides, including | |
| | | | dCTP. Gemcitabine | |
| | | | triphosphate also competes | |
| | | | with dCTP for incorporation | |
| | | | into DNA. The reduction in | |
| | | | the intracellular | |
| | | | concentration of dCTP | |
| | | | enhances the incorporation | |
| | | | of gemcitabine triphosphate | |
| | | | into DNA. After the | |
| | | | gemcitabine nucleotide is | |
| | | | incorporated into DNA, only | |
| | | | one additional nucleotide is | |
| | | | added to the growing DNA | |
| | | | strands, after which there is | |
| | | | inhibition of DNA synthesis. | |
| Purinethol | Inhibits | Hypoxanthine- | Mercaptopurine competes | acute lymphatic |
| (mercaptopurine) | purine | guanine | with hypoxanthine and | leukemia |
| | synthesis | phosphoribosyltransferase | guanine for the enzyme | |
| | | (HGPRTase) | hypoxanthine-guanine | |
| | | | phosphoribosyltransferase | |
| | | | (HGPRTase). See next entry | |
| Thioguanine | Inhibits | Hypoxanthine- | Competes with hypoxanthine | acute |
| | purine | guanine | and guanine for the enzyme | nonlymphocytic |
| | synthesis | phosphoribosyltransferase | hypoxanthine-guanine | leukemias |
| | | (HGPRTase) | phosphoribosyltransferase | |
| | | | (HGPRTase) and is | |
| | | | converted to 6-thioguanylic | |
| | | | acid (TGMP). TGMP | |
| | | | interferes at several points | |
| | | | with the synthesis of guanine | |
| | | | nucleotides. It inhibits de | |
| | | | novo purine biosynthesis by | |
| | | | pseudo-feedback inhibition | |
| | | | of glutamine-5- | |
| | | | phosphoribosyl- | |
| | | | pyrophosphate | |
| | | | amidotransferase resulting in | |
| | | | a sequential blockade of the | |
| | | | synthesis and utilization of | |
| | | | the purine nucleotides. | |

### (b) In Vivo Screening

[0245] Following identification in plate-based in vitro assays, selected siRNAs may be further tested in art-accepted animal model systems to assess gene silencing effects in vivo. Exemplary animal model systems include xenomouse models wherein specific human tumors (non drug resistant and drug resistant) are propagated in select mouse strains. The testing involves the delivery of the siRNA to its specific target and measuring the silencing effect of the gene. Measuring of the silencing effect may, for example, be achieved by flow cytometry and/or plate based assays.

[0246] SEQ ID NO: 1-5308 are set out in the attached Sequence Listing. The codes for polynucleotide and polypeptide sequences used in the attached Sequence Listing confirm to WIPO Standard ST.25 (1988), Appendix 2.

[0247] All references cited herein, including patent references and non-patent references, are hereby incorporated by reference in their entireties.

1. A composition comprising a small interfering nucleic acid molecule (siNA) that is capable of reducing expression of a target gene wherein the target gene encodes a protein selected from the group consisting of: hexokinase 2 (HK-II); lactate dehydrogenase 5 (LDHA); glucose-6-phosphate dehydrogenase (H6PD); phosphofructokinase 3 (PFKL); 5-phosphoribosyl-1-pyrophosphate synthetase (PRPS); amido-phosphoribosyltransferase (PPAT); carbamoyl phosphate synthetase 1 (CPS1); carbamoyl phosphate synthetase 2 (CAD); ribonucleotide reductase subunit 1 (RRM1); ribonucleotide reductase subunit 2 (RRM2); ribonucleotide reductase subunit 2B (RRM2B); thymidylate synthetase (TYMS); dihydrofolate reductase (DHFR); adenylate kinase (AK1); NAD synthase (NADSYN); flavin adenine dinucleotide (FAD) synthetase (FLAD1); NADH-Q reductase; cytochrome reductase (UQCRC2); cytochrome oxidase (COX5A); ATP synthase (F0F1-ATPase); beta chain (ATP5B); fatty acid synthase (FASN); ATP citrate lyase (ACLY); ATP-ADP translocase 1 (ANT1); ATP-ADP translocase 2 (ANT2); ATP-ADP translocase 3 (ANT3); CTP synthase (CTPS); inosine monophosphate dehydrogenase 2 (IMPD2); deoxycytidine kinase (DCK); thymidine kinase 1 (TK1); thymidine kinase 2 (TK2); deoxyguanosine kinase (DGUOK); uridine monophosphate synthase (UMPS); dihydropyrimidine dehydrogenase (DPYD); HIF1α (HIF1A); ARNT (HIF1B); GLUT1 (SLC2A1); GLUT3 (SLC2A3); GLUT5 (SLC2A5); GLUT12 (SLC2A12); ENT1 (SLC29A1); ENT2 (SLC29A2); ENT3 (SLC29A3); ENT4 (SLC29A4); CNT1 (SLC28A1); CNT2 (SLC28A2); CNT3 (SLC28A3); ASCT1 (SLC1A4); ASCT2 (SLC1A5); 4F2hc (SLC3A2); ATB^{0,+} (SLC6A14); LAT1 (SLC7A5); xCT (SLC7A11); LAT3 (SLC43A1); SNAT3 (SLC43A4); SNAT5 (SLC43A5); SMVT1 (SLC5A6); RFC(SLC19A1); ThTr1 (SLC19A1); ThTr2 (SLC19A2); SVCT1 (SLC23A1); SVCT2 (SLC23A2); CIC (SLC25A1); DIC (SLC25A10); NHE1 (SLC9A1); MCT1 (SLC16A1); PMCA1 (ATP2B1); PMCA2 (ATP2B2); PMCA4 (ATP2B4); V-type proton pump (subunit proteins encoded by ATP6V1A, ATP6V1B2, ATP6V1C1, ATP6V1E1, ATP6V1F); ATP7A; ATP7B; MDR1 (ABCB1); MRP4 (ABCC4); MRP5 (ABCC5); and YBX1.

2. The composition of claim 1, wherein the target gene is selected from the group consisting of SEQ ID NO: 1 to 15 and 17 to 92.

3. The composition of claim 1, wherein the siNA is targeted against a region of the target gene selected from the group consisting of: 5′ untranslated regions; coding regions; 3′ untranslated regions; and promoter regions.

4. The composition of claim 1, wherein the siNA is directed against a target sequence selected from the group consisting of: SEQ ID NO: 1 to 15 and 17 to 92.

5. (canceled)

6. The composition of claim 1, wherein the siNA is from 19 to 30 nucleotides in length.

7. The composition of claim 6, wherein the siNA is from 19 to 25 nucleotides in length.

8. The composition of claim 6, wherein the siNA is from 26 to 30 nucleotides in length.

9. The composition of claim 6, wherein the siNA is 27 nucleotides in length.

10. The composition of claim 1, wherein the siNA is chemically modified.

11. The composition of claim 1, wherein the siNA is a double-stranded RNA molecule.

12. The composition of claim 1, further comprising a nucleic acid binding component that condenses and protects the siNA.

13. The composition of claim 1, wherein the siNA is formulated as a liposome.

14. The composition of claim 13, wherein the liposome is a pegylated liposome.

15. The composition of claim 1, wherein the siNA is attached to a lipid or polymer carrier.

16. The composition claim 1, further comprising a binding agent that specifically binds to a target internalizable antigen expressed on the surface of a target cell of interest.

17. The composition of claim 1, further comprising a physiologically acceptable carrier.

18. The composition of claim 1, further comprising a chemotherapeutic agent.

19. A composition comprising a genetic construct that is capable of expressing a short-hairpin RNA (shRNA) which is processed within the cell to a small interfering nucleic acid molecule (siNA), wherein the siNA is capable of reducing expression of a target gene that encodes a protein selected from the group consisting of: hexokinase 2 (HK-II); lactate dehydrogenase 5 (LDHA); glucose-6-phosphate dehydrogenase (H6PD); phosphofructokinase 3 (PFKL); 5-phosphoribosyl-1-pyrophosphate synthetase (PRPS); amido-phosphoribosyltransferase (PPAT); carbamoyl phosphate synthetase 1 (CPS1); carbamoyl phosphate synthetase 2 (CAD); ribonucleotide reductase subunit 1 (RRM1); ribonucleotide reductase subunit 2 (RRM2); ribonucleotide reductase subunit 2B (RRM2B); thymidylate synthetase (TYMS); dihydrofolate reductase (DHFR); adenylate kinase (AK1); NAD synthase (NADSYN); flavin adenine dinucleotide (FAD) synthetase (FLAD1); NADH-Q reductase; cytochrome reductase (UQCRC2); cytochrome oxidase (COX5A); ATP synthase (F0F1-ATPase); beta chain (ATP5B); fatty acid synthase (FASN); ATP citrate lyase (ACLY); ATP-ADP translocase 1 (ANT1); ATP-ADP translocase 2 (ANT2); ATP-ADP translocase 3 (ANT3); CTP synthase (CTPS); inosine monophosphate dehydrogenase 2 (IMPD2); deoxycytidine kinase (DCK); thymidine kinase 1 (TK1); thymidine kinase 2 (TK 2); deoxyguanosine kinase (DGUOK); uridine monophosphate synthase (UMPS); dihydropyrimidine dehydrogenase (DPYD); HIF1α: (HIF1A); ARNT (HIF1B); GLUT1 (SLC2A1); GLUT3 (SLC2A3); GLUT5 (SLC2A5); GLUT12 (SLC2A12); ENT1 (SLC29A1); ENT2 (SLC29A2); ENT3 (SLC29A3); ENT4 (SLC29A4); CNT1 (SLC28A1); CNT2 (SLC28A2); CNT3 (SLC28A3); ASCT1 (SLC1A4); ASCT2 (SLC1A5); 4F2hc (SLC3A2); ATB^{0,+} (SLC6A14); LAT1 (SLC7A5); xCT (SLC7A11); LAT3 (SLC43A1); SNAT3 (SLC43A4); SNAT5 (SLC43A5); SMVT1 (SLC5A6); RFC (SLC19A1); ThTr1 (SLC19A1); ThTr2 (SLC19A2); SVCT1 (SLC23A1); SVCT2 (SLC23A2); CIC (SLC25A1); DIC (SLC25A10); NHE1 (SLC9A1); MCT1 (SLC16A1); PMCA1 (ATP2B1); PMCA2 (ATP2B2); PMCA4 (ATP2B4); V-type proton pump (subunit proteins encoded by ATP6V1A, ATP6V1B2, ATP6V1C1, ATP6V1E1, ATP6V1F); ATP7A; ATP7B; MDR1 (ABCB1); MRP4 (ABCC4); MRP5 (ABCC5); and YBX1.

20. The composition of claim 19, wherein the genetic construct comprises a promoter that is specific to a target cell of interest.

21. The composition of claim 19, wherein the target gene is selected from the group consisting of: SEQ ID NO: 1 to 15 and 17 to 92.

22. The composition of claim 19, wherein the siNA is targeted against a region of the target gene selected from the group consisting of: 5′ untranslated regions; coding regions; 3′ untranslated regions; and promoter regions.

23. The composition of claim 19, wherein the siNA is directed against a target sequence selected from the group consisting of: SEQ ID NO: 1 to 15 and 17 to 92.

24. (canceled)

25. The composition of claim 19, wherein the siNA is from 19 to 30 nucleotides in length.

26. The composition of claim 25, wherein the siNA is from 19 to 25 nucleotides in length.

27. The composition of claim 25, wherein the siNA is from 26 to 30 nucleotides in length.

28. The composition of claim 25, wherein the siNA is 27 nucleotides in length.

29. The composition of claim 19, further comprising a binding agent that specifically binds to a target internalizable antigen expressed on the surface of target cell of interest.

30. The composition of claim 17, further comprising a physiologically acceptable carrier.

31. The composition of claim 17, further comprising a chemotherapeutic agent.

32. A method for the treatment of a disorder in a patient, comprising administering to the patient a composition of claim 1.

33. The method of claim 32, further comprising administering a chemotherapeutic agent.

34. The method of claim 32, wherein the disorder is a cancer.

35. The method of claim 34, wherein the cancer selected from the group consisting of: primary and metastatic tumors and carcinomas of the breast, colon, rectum, lung, oropharynx, hypopharynx, esophagus, stomach, pancreas, liver, gall bladder, bile ducts, small intestine, kidney, bladder, urothelium, cervix, uterus, ovaries, prostate, seminal vesicles, testes, endocrine glands, head, neck and skin; tumors of the brain, nerves, eyes or meninges; astrocytomas; gliomas; glioblastomas; retinoblastomas; neuromas; neuroblastomas; solid tumors arising from hematopoietic malignancies; leukemia; myeloma; melanoma and lymphomas.

36. A method for the treatment of a disorder in a patient, comprising administering to the patient a composition of claim 19.

37. The method of claim 36, further comprising administering a chemotherapeutic agent.

38. The method of claim 36, wherein the disorder is a cancer.

39. The method of claim 38, wherein the cancer selected from the group consisting of: primary and metastatic tumors and carcinomas of the breast, colon, rectum, lung, oropharynx, hypopharynx, esophagus, stomach, pancreas, liver, gall bladder, bile ducts, small intestine, kidney, bladder, urothelium, cervix, uterus, ovaries, prostate, seminal vesicles, testes, endocrine glands, head, neck and skin; tumors of the brain, nerves, eyes or meninges; astrocytomas; gliomas; glioblastomas; retinoblastomas; neuromas; neuroblastomas; solid tumors arising from hematopoietic malignancies; leukemia; myeloma; melanoma and lymphomas.

40. A method for identifying an siNA molecule for the treatment of a disease, the method comprising:
(a) generating a population of candidate siNA molecules directed against a target gene; and
(b) comparing the in vitro efficacy candidate siNA molecules, alone or in combination, with the in vitro efficacy of the chemotherapeutic drug; and
(c) comparing the in vitro efficacy of the siNA(s) alone or the chemotherapeutic drug alone with that of a treatment comprising a combination of siNA(s) with the chemotherapeutic drug.

41. The method of claim 40, further comprising comparing the in vivo efficacy of at least one of the candidate siNA molecules with the in vivo efficacy of the chemotherapeutic drug in an animal model system for the disease, either as single agents (siNA alone or the chemotherapeutic drug alone) or as combinations (multiple siNAs or siNA with the chemotherapeutic drug).

42. The method of claim 40, wherein the target gene is selected from the group consisting of:
(a) genes that are part of a biochemical or metabolic process;
(b) genes that are involved in resistance to chemotherapeutic drugs; and
(c) genes that encode a protein product that is a target of a chemotherapeutic drug that is known to be effective in treatment of the disease.

43. The method of claim 42, wherein the protein product is selected from the group consisting of: hexokinase 2 (HK-II); lactate dehydrogenase 5 (LDHA); glucose-6-phosphate dehydrogenase (H6PD); phosphofructokinase 3 (PFKL); 5-phosphoribosyl-1-pyrophosphate synthetase (PRPS); amido-phosphoribosyltransferase (PPAT); carbamoyl phosphate synthetase 1 (CPS1); carbamoyl phosphate synthetase 2 (CAD); ribonucleotide reductase subunit 1 (RRM1); ribonucleotide reductase subunit 2 (RRM2); ribonucleotide reductase subunit 2B (RRM2B); thymidylate synthetase (TYMS); dihydrofolate reductase (DHFR); adenylate kinase (AK1); NAD synthase (NADSYN); flavin adenine dinucleotide (FAD) synthetase (FLAD1); NADH-Q reductase; cytochrome reductase (UQCRC2); cytochrome oxidase (COX5A); ATP synthase (F0F1-ATPase); beta chain (ATP5B); fatty acid synthase (FASN); ATP citrate lyase (ACLY); ATP-ADP translocase 1 (ANT1); ATP-ADP translocase 2 (ANT2); ATP-ADP translocase 3 (ANT3); CTP synthase (CTPS); inosine monophosphate dehydrogenase 2 (IMPD2); deoxycytidine kinase (DCK); thymidine kinase 1 (TK1); thymidine kinase 2 (TK 2); deoxyguanosine kinase (DGUOK); uridine monophosphate synthase (UMPS); dihydropyrimidine dehydrogenase (DPYD); HIF1α (HIF1A); ARNT (HIF1B); GLUT1 (SLC2A1); GLUT3 (SLC2A3); GLUT5 (SLC2A5); GLUT12 (SLC2A12); ENT1 (SLC29A1); ENT2 (SLC29A2); ENT3 (SLC29A3); ENT4 (SLC29A4); CNT1 (SLC28A1); CNT2 (SLC28A2); CNT3 (SLC28A3); ASCT1 (SLC1A4); ASCT2 (SLC1A5); 4F2hc (SLC3A2); ATB^{0,+} (SLC6A14); LAT1 (SLC7A5); xCT (SLC7A11); LAT3 (SLC43A1); SNAT3 (SLC43A4); SNAT5 (SLC43A5); SMVT1 (SLC5A6); RFC (SLC19A1); ThTr1 (SLC19A1); ThTr2 (SLC19A2); SVCT1 (SLC23A1); SVCT2 (SLC23A2); CIC (SLC25A1); DIC (SLC25A10); NHE1 (SLC9A1); MCT1 (SLC16A1); PMCA1 (ATP2B1); PMCA2 (ATP2B2); PMCA4 (ATP2B4); V-type proton pump (subunit proteins encoded by ATP6V1A, ATP6V1B2, ATP6V1C1, ATP6V1E1, ATP6V1F); ATP7A; ATP7B; MDR1 (ABCB1); MRP4 (ABCC4); MRP5 (ABCC5); and YBX1.

44. The method of claim 40, wherein the chemotherapeutic drug is selected from the group consisting of: capecitabine, methotrexate, fluorouridine, 5-fluorouracil, gemcitabine, doxorubicin, etoposide and cisplatin.

The application's sequence listing, which the Patent Office published only in electronic form, follows.

SEQUENCE LISTING (5308 sequences)

SEQ ID NO: 1 - DNA, 3938 bp, Human
gtgctgcctcgtctgaggggacaggaggatcaccctcttcgtcgcttcggccagtgtgtcgggctgggccctgacaagccacctgaggagaggctcggagccgggcccggaccccggcgattgccgcccgcttctctctagtctcacgaggggtttcccgcctcgcacccccacctctggacttgcctttccttctcttctccgcgtgtggagggagccagcgcttaggccggagcgagcctgggggccgcccgccgtgaagacatcgcggggaccgattcaccatggagggcgccggcggcgcgaacgacaagaaaaagataagttctgaacgtcgaaaagaaaagtctcgagatgcagccagatctcggcgaagtaaagaatctgaagttttttatgagcttgctcatcagttgccacttccacataatgtgagttcgcatcttgataaggcctctgtgatgaggcttaccatcagctatttgcgtgtgaggaaacttctggatgctggtgatttggatattgaagatgacatgaaagcacagatgaattgcttttatttgaaagccttggatggttttgttatggttctcacagatgatggtgacatgatttacatttctgataatgtgaacaaatacatgggattaactcagtttgaactaactggacacagtgtgtttgattttactcatccatgtgaccatgaggaaatgagagaaatgcttacacacagaaatggccttgtgaaaaagggtaaagaacaaaacacacagcgaagcttttttctcagaatgaagtgtaccctaactagccgaggaagaactatgaacataaagtctgcaacatggaaggtattgcactgcacaggccacattcacgtatatgataccaacagtaaccaacctcagtgtgggtataagaaaccacctatgacctgcttggtgctgatttgtgaacccattcctcacccatcaaatattgaaattcctttagatagcaagactttcctcagtcgacacagcctggatatgaaattttcttattgtgatgaaagaattaccgaattgatgggatatgagccagaagaacttttaggccgctcaatttatgaatattatcatgctttggactctgatcatctgaccaaaactcatcatgatatgtttactaaaggacaagtcaccacaggacagtacaggatgcttgccaaaagaggtggatatgtctgggttgaaactcaagcaactgtcatatataacaccaagaattctcaaccacagtgcattgtatgtgtgaattacgttgtgagtggtattattcagcacgacttgattttctcccttcaacaaacagaatgtgtccttaaaccggttgaatcttcagatatgaaaatgactcagctattcaccaaagttgaatcagaagatacaagtagcctctttgacaaacttaagaaggaacctgatgctttaactttgctggccccagccgctggagacacaatcatatctttagattttggcagcaacgacacagaaactgatgaccagcaacttgaggaagtaccattatataatgatgtaatgctcccctcacccaacgaaaaattacagaatataaatttggcaatgtctccattacccaccgctgaaacgccaaagccacttcgaagtagtgctgaccctgcactcaatcaagaagttgcattaaaattagaaccaaatccagagtcactggaactttcttttaccatgccccagattcaggatcagacacctagtccttccgatggaagcactagacaaagttcacctgagcctaatagtcccagtgaatattgtttttatgtggatagtgatatggtcaatgaattcaagttggaattggtagaaaaactttttgctgaagacacagaagcaaagaacccattttctactcaggacacagatttagacttggagatgttagctccctatatcccaatggatgatgacttccagttacgttccttcgatcagttgtcaccattagaaagcagttccgcaagccctgaaagcgcaagtcctcaaagcacagttacagtattccagcagactcaaatacaagaacctactgctaatgccaccactaccactgccaccactgatgaattaaaaacagtgacaaaagaccgtatggaagacattaaaatattgattgcatctccatctcctacccacatacataaagaaactactagtgccacatcatcaccatatagagatactcaaagtcggacagcctcaccaaacagagcaggaaaaggagtcatagaacagacagaaaaatctcatccaagaagccctaacgtgttatctgtcgctttgagtcaaagaactacagttcctgaggaagaactaaatccaaagatactagctttgcagaatgctcagagaaagcgaaaaatggaacatgatggttcactttttcaagcagtaggaattggaacattattacagcagccagacgatcatgcagctactacatcactttcttggaaacgtgtaaaaggatgcaaatctagtgaacagaatggaatggagcaaaagacaattattttaataccctctgatttagcatgtagactgctggggcaatcaatggatgaaagtggattaccacagctgaccagttatgattgtgaagttaatgctcctatacaaggcagcagaaacctactgcagggtgaagaattactcagagctttggatcaagttaactgagctttttcttaatttcattcctttttttggacactggtggctcattacctaaagcagtctatttatattttctacatctaattttagaagcctggctacaatactgcacaaacttggttagttcaattttgatcccctttctacttaatttacattaatgctcttttttagtatgttctttaatgctggatcacagacagctcattttctcagttttttggtatttaaaccattgcattgcagtagcatcattttaaaaaatgcacctttttatttatttatttttggctagggagtttatccctttttcgaattatttttaagaagatgccaatataatttttgtaagaaggcagtaacctttcatcatgatcataggcagttgaaaaatttttacaccttttttttcacattttacataaataataatgctttgccagcagtacgtggtagccacaattgcacaatatattttcttaaaaaataccagcagttactcatggaatatattctgcgtttataaaactagtttttaagaagaaattttttttggcctatgaaattgttaaacctggaacatgacattgttaatcatataataatgattcttaaatgctgtatggtttattatttaaatgggtaaagccatttacataatatagaaagatatgcatatatctagaaggtatgtggcatttatttggataaaattctcaattcagagaaatcatctgatgtttctatagtcactttgccagctcaaaagaaaacaataccctatgtagttgtggaagtttatgctaatattgtgtaactgatattaaacctaaatgttctgcctaccctgttggtataaagatattttgagcagactgtaaacaagaaaaaaaaaatcatgcattcttagcaaaattgcctagtatgttaatttgctcaaaatacaatgtttgattttatgcactttgtcgctattaacatcctttttttcatgtagatttcaataattgagtaattttagaagcattattttaggaatatatagttgtcacagtaaatatcttgttttttctatgtacattgtacaaatttttcattccttttgctctttgtggttggatctaacactaactgtattgttttgttacatcaaataaacatcttctgtggaccagg

SEQ ID NO: 2 - DNA, 4751 bp, Mouse
gagcgggcgcgcgcacccctcggcttttccctcccctcgccgcgcgcccgagcgcgcctccgcccttgcccgccccctgccgctgcttcagcgcctcagtgcacagagcctcctcggctgaggggacgcgaggactgtcctcgccgccgtcgcgggcagtgtctagccaggccttgacaagctagccggaggagcgcctaggaacccgagccggagctcagcgagcgcagcctgcagctcccgcctcgccgtcccggggggcgtcccgcctcccaccccgcctctggacttgtctctttctccgcgcgcgcggacagagccggcgtttaggcccgagcgagcccgggggccgccggccgggaagacaacgcgggcaccgattcgccatggagggcgccggcggcgagaacgagaagaaaaataggatgagttctgaacgtcgaaaagaaaagtctagagatgcagcaagatctcggcgaagcaaagagtctgaagttttttatgagcttgctcatcagttgccacttccccacaatgtgagctcacatcttgataaagcttctgttatgaggctcaccatcagttatttacgtgtgagaaaacttctggatgccggtggtctagacagtgaagatgagatgaaggcacagatggactgtttttatctgaaagccctagatggctttgtgatggtgctaacagatgacggcgacatggtttacatttctgataacgtgaacaaatacatggggttaactcagtttgaactaactggacacagtgtgtttgattttactcatccatgtgaccatgaggaaatgagagaaatgcttacacacagaaatggcccagtgagaaaagggaaagaactaaacacacagcggagcttttttctcagaatgaagtgcaccctaacaagccgggggaggacgatgaacatcaagtcagcaacgtggaaggtgcttcactgcacgggccatattcatgtctatgataccaacagtaaccaacctcagtgtgggtacaagaaaccacccatgacgtgcttggtgctgatttgtgaacccattcctcatccgtcaaatattgaaattcctttagatagcaagacatttctcagtcgacacagcctcgatatgaaattttcttactgtgatgaaagaattactgagttgatgggttatgagccggaagaacttttgggccgctcaatttatgaatattatcatgctttggattctgatcatctgaccaaaactcaccatgatatgtttactaaaggacaagtcaccacaggacagtacaggatgcttgccaaaagaggtggatatgtctgggttgaaactcaagcaactgtcatatataatacgaagaactcccagccacagtgcattgtgtgtgtgaattatgttgtaagtggtattattcagcacgacttgattttctcccttcaacaaacagaatctgtgctcaaaccagttgaatcttcagatatgaagatgactcagctgttcaccaaagttgaatcagaggatacaagctgcctttttgataagcttaagaaggagcctgatgctctcactctgctggctccagctgccggcgacaccatcatctctctggattttggcagcgatgacacagaaactgaagatcaacaacttgaagatgttccattatataatgatgtaatgtttccctcttctaatgaaaaattaaatataaacctggcaatgtctcctttaccttcatcggaaactccaaagccacttcgaagtagtgctgatcctgcactgaatcaagaggttgcattaaaattagaatcaagtccagagtcactgggactttcttttaccatgccccagattcaagatcagccagcaagtccttctgatggaagcactagacaaagttcacctgagagacttcttcaggaaaacgtaaacactcctaacttttcccagcctaacagtcccagtgaatattgctttgatgtggatagcgatatggtcaatgtattcaagttggaactggtggaaaaactgtttgctgaagacacagaggcaaagaatccattttcaactcaggacactgatttagatttggagatgctggctccctatatcccaatggatgatgatttccagttacgttcctttgatcagttgtcaccattagagagcaattctccaagccctccaagtatgagcacagttactgggttccagcagacccagttacagaaacctaccatcactgccactgccaccacaactgccaccactgatgaatcaaaaacagagacgaaggacaataaagaagatattaaaatactgattgcatctccatcttctacccaagtacctcaagaaacgaccactgctaaggcatcagcatacagtggcactcacagtcggacagcctcaccagacagagcaggaaagagagtcatagaacagacagacaaagctcatccaaggagccttaacctgtctgccactttgaatcaaagaaatactgttcctgaggaagaattaaacccaaagacaatagcttcgcagaatgctcagaggaagcgaaaaatggaacatgatggctccctttttcaagcagcaggaattggaacattattgcagcaaccaggtgactgtgcacctactatgtcactttcctggaaacgagtgaaaggattcatatctagtgaacagaatggaacggagcaaaagactattattttaataccctccgatttagcatgcagactgctggggcagtcaatggatgagagtggattaccacagctgaccagttacgattgtgaagttaatgctcccatacaaggcagcagaaacctactgcagggtgaagaattactcagagctttggatcaagttaactgagcgtttcctaatctcattccttttgattgttaatgtttttgttcagttgttgttgtttgttgggtttttgtttctgttggttatttttggacactggtggctcagcagtctatttatattttctatatctaattttagaagcctggctacaatactgcacaaactcagatagtttagttttcatcccctttctacttaattttcattaatgctctttttaatatgttcttttaatgccagatcacagcacattcacagctcctcagcatttcaccattgcattgctgtagtgtcatttaaaatgcacctttttatttatttatttttggtgagggagtttgtcccttattgaattatttttaatgaaatgccaatataattttttaagaaagcagtaaattctcatcatgatcataggcagttgaaaactttttactcatttttttcatgttttacatgaaaataatgctttgtcagcagtacatggtagccacaattgcacaatatattttctttaaaaaaccagcagttactcatgcaatatattctgcatttataaaactagtttttaagaaattttttttggcctatggaattgttaagcctggatcatgaagctgttgatcttataatgattcttaaactgtatggtttctttatatgggtaaagccatttacatgatataaagaaatatgcttatatctggaaggtatgtggcatttatttggataaaattctcaattcagagaagttatctggtgtttcttgactttaccaactcaaaacagtccctctgtagttgtggaagcttatgctaatattgtgtaattgattatgaaacataaatgttctgcccaccctgttggtataaagacattttgagcatactgtaaacaaacaaacaaaaaatcatgctttgttagtaaaattgcctagtatgttgatttgttgaaaatatgatgtttggttttatgcactttgtcgctattaacatccttttttcatatagatttcaataagtgagtaattttagaagcattattttaggaatatagagttgtcatagtaaacatcttgttttttctatgtatactgtataaatttttcgttcccttgctctttgtggttgggtctaacactaactgtactgttttgttatatcaaataaacatcttctgtggaccaggccccctgggtcagcgcttacgtttaaataacatttgtctcaacatttctagctcataaaacgatttctcaaaaatttaagttctttataaaaattagattgtacatttctacattcattttattgccattttctaatgtatgatgtgtccctaaatgtcatgttaaataatgacatcataatattgcattgtaaagagaatttttttttagaattttgccattataaatgtatgagtctattaaaatataaagtacaaaccttcagtatttgcagtatgaatggagtaagtgaaacagttcatgaaacatgatcatactgttttgagggctcaggctcctgcgtgcatgtctaatctgttcccattagcaggtgaaggaagctagggctgaaacaagagttttccgcgctctcagggagctatgtggcatgtcagaatcttaggtctcagaacataccttgtttggttttgatattggtttggtttgattctggtacatggcacattaatatgcagatacattatatagataatcatatattacctgatgtttctttactttgccagctttaaaaaagtatcttatgcaattgtgaattttagaaacttccaaataaacaccacaaaccttccagcttatatgcatatctttctagttcatgt

SEQ ID NO: 3 - DNA, 4858 bp, Human
ttggattccgcggtagcggaggcggcggtcaggcgccgcttctggggagtggcctttcttttcccctccctcccggttcggtggcggcggctcctcccagggggggggtggcgcggcggcggtggcatctgcggccatggcggcgactactgccaaccccgcctgatcttggactcaagattctcctgcctcagaccccgagtagctgggactacagaaatgacatcagatgtaccatcactgggtccagccattgcctctggaaactctggacctggaattcaaggtggaggagccattgtccagagggctattaagcggcgaccagggctggattttgatgatgatggagaagggaacagtaaatttttgaggtgtgatgatgatcagatgtctaacgataaggagcggtttgccaggtcggatgatgagcagagctctgcggataaagagagacttgccagggaaaatcacagtgaaattgaacggcggcgacggaacaagatgacagcctacatcacagaactgtcagatatggtacccacctgtagtgccctggctcgaaaaccagacaagctaaccatcttacgcatggcagtttctcacatgaagtccttgcggggaactggcaacacatccactgatggctcctataagccgtctttcctcactgatcaggaactgaaacatttgatcttggaggcagcagatggctttctgtttattgtctcatgtgagacaggcagggtggtgtatgtgtctgactccgtgactcctgttttgaaccagccacagtctgaatggtttggcagcacactctatgatcaggtgcacccagatgatgtggataaacttcgtgagcagctttccacttcagaaaatgccctgacagggcgtatcctggatctaaagactggaacagtgaaaaaggaaggtcagcagtcttccatgagaatgtgtatgggctcaaggagatcgtttatttgccgaatgaggtgtggcagtagctctgtggacccagtttctgtgaataggctgagctttgtgaggaacagatgcaggaatggacttggctctgtaaaggatggggaacctcacttcgtggtggtccactgcacaggctacatcaaggcctggcccccagcagatgatgacccagaggctggccagggaagcaagttttgcctagtggccattggcagattgcaggtaactagttctcccaactgtacagacatgagtaatgtttgtcaaccaacagagttcatctcccgacacaacattgagggtatcttcacttttgtggatcaccgctgtgtggctactgttggctaccagccacaggaactcttaggaaagaatattgtagaattctgtcatcctgaagaccagcagcttctaagagacagcttccaacaggtagtgaaattaaaaggccaagtgctgtctgtcatgttccggttccggtctaagaaccaagaatggctctggatgagaaccagctcctttactttccagaacccttactcagatgaaattgagtacatcatctgtaccaacaccaatgtgaagaactctagccaagaaccacggcctacactctccaacacaatccagaggccacaactaggtcccacagctaatttacccctggagatgggctcaggacagctggcacccaggcagcagcaacagcaaacagaattggacatggtaccaggaagagatggactggccagctacaatcattcccaggtggttcagcctgtgacaaccacaggaccagaacacagcaagccccttgagaagtcagatggtttatttgcccaggatagagatccaagattttcagaaatctatcacaacatcaatgcggatcagagtaaaggcatctcctccagcactgtccctgccacccaacagctattctcccagggcaacacattccctcctaccccccggccggcagagaatttcaggaatagtggcctagcccctcctgtaaccattgtccagccatcagcttctgcaggacagatgttggcccagatttcccgccactccaaccccacccaaggagcaaccccaacttggacccctactacccgctcaggcttttctgcccagcaggtggctacccaggctactgctaagactcgtacttcccagtttggtgtgggcagctttcagactccatcctccttcagctccatgtccctccctggtgccccaactgcatcgcctggtgctgctgcctaccctagtctcaccaatcgtggatctaactttgctcctgagactggacagactgcaggacaattccagacacggacagcagagggtgtgggtgtctggccacagtggcagggccagcagcctcatcatcgttcaagttctagtgagcaacatgttcaacaaccgccagcacagcaacctggccagcctgaggtcttccaggagatgctgtccatgctgggagatcagagcaacagctacaacaatgaagaattccctgatctaactatgtttccccccttttcagaatagaactattggggtgaggataaggggtgggggagaaaaaatcactgtttgtttttaaaaagcaaatctttctgtaaacagaataaaagttcctctcccttcccttccctcacccctgacatgtaccccctttcccttctggctgttcccctgctctgttgcctctctaaggtaacatttatagaagaaatggaatgaatctccaaggcttttaggactgtctgaaaatttgaggctgggtgaagttaaaacacctttccttatgtctcctgacctgaaattgtatagtgttgatttgtgctgagatcaagaggcaggttagaagaacctgacatccactgtttgccttggatagtatggcttgtttttggaaagaaattctgaagagagtggaggagaggagaaatgtcctcatatttgaggaccatgaaacattgtaggtatatatggggctttagcaagtttgagcataggctctttttgctgcctgtgagcagtccctctggaaagaaacatgtgagtaagtgagagagagtgtgtgtgtatgtgtgtgtgtgtgtgtgtgcgcacacatgcttctgtatttcactctttctccctattagggagttatgcaaaatttgtccccgattttacctttgtctttctgtgtacttttcaaagagtcctaaggagttaaatcttccaggtattttccacttagtattgcagccaaagaatatttaaataaacgtctttgctgcgcttgcatccatgcccagccaatatacaactgtaaagcaaatatagaaagtcggctgttgatacgattgtctgttatcgaacacattcagtgataaagctgggttactgctgcttttggtgctctcaccttatctggaagatctgcaaacattacctaaataggctggcaagataaacactttctggaacccgagacttggccataaagataatgctgcatttttctgtcagaatcacatatgatgtgtgttctgtagaggttatttctgcatggaaactcaacttcttggattagccgtcccagtgaaaatcctcattgttggagtgtaaaccaaatacgaagccctcttgcaaagtagcctctttcatcccatactcaaaatacccagtttagcaagcaactgagatttaagtctctctggccctaagaggtttttcctctttgctccctccaatcttgagattgggttttgctttagagtgcaagtatcataattccgtatgatagatggggcctggacacccatctcaacagggtcacttggtaattaacaatagccatataaatgcggatacaggttactaccctcaccctttaccttcctcaggtaacagtcgtagataccagcttttttttttttttttttaaattggctttggccagtagctaaagtgcaagactgaattaatgagaagatatattaaatgtagtcataggggactgaggagcaagggtggccttgaagaggccaaaggaatgtccatttgctgagtttcccttccttatgtctccagtctggtgccaggtagtggagtaaaaaaggagacagtttatttttttattctatgtgcacacttacagtatacatatatatttatatcacaatttacgaaaccaaaaagttgagtttccaatggaacccttgttttttaataatcgactttttaaatgtgatcaggactataatattgtacagttattatagggcttttggggaaggggaggatagcgagaagatgctctgggggttttgtttttgcttttccttcagggttttatttttgactgttttgttttcttgttggccatttctgtattgctggcatctgtgctaagctttacagtggcaaaaataatgacatgtagcaaagattttcaaacaaaatattttttccttttgtaaaatttcttgtgttgtgtgatcttgattgcggctttatcattcctttccagttcataaacaacaggcacccacaaccagaggaatctatagtttaagctccagacatacaaacataaggcacattgtgtctttaatttcaggaatcagaaatcatagggttctgatcacattgcacgcctcccccctcacttgtcctcctgatcctgacacattctgagtaacatcagcaggaatgctctgaccatgaggtgggggttttggggtgggcgttgcctgggttcttgggagagaggggaagagtcgggacttgaaaaccactagggcacatctggatgccttcccccagtatgtccttttctggattaaaatgagtgaaatttaaactg

SEQ ID NO: 4 - DNA, 2666 bp, Mouse
gcggcggtaaggtgcctaatctgcggagtggctcttccctcccctcccccagctcggtggcggctgcccctcccaccgagggtggcgcagggacggtgccatctcgaccatggcggcgactacagctaacccagaaatgacatcagatgtaccatcgctgggtcccaccattgcttctggaaaccctggacctgggattcaaggtggaggagctgttgtacagagggctattaagcgacggtcagggctggattttgatgatgaagtagaagtgaacactaaatttttgagatgcgatgatgaccagatgtgtaatgacaaagagcggtttgccaggtcggatgatgagcagagctctgcggataaagagagacttgccagggaaaatcatagtgaaatagaacggcggcgacggaacaagatgacagcttacatcacagaactgtcagacatggtacctacatgtagtgccctggctcgaaaaccagacaagctaaccatcttacgcatggccgtttctcacatgaagtccttgaggggaactggcaacacatctactgatggctcctacaagccatctttcctcactgatcaggaactgaaacatttgatcttggaggcagcagatggctttctgtttattgtctcctgtgagactggacgggtggtgtatgtctctgactcagtgactcccgttttgaaccagccacagtctgaatggttcgggagcacactgtatgatcaggtgcacccagatgatgtggataaacttcgagagcagctctctacatcagaaaatgccctaacagggcgggtcctggatctgaagactggaacagtgaaaaaggaaggccagcagtcttccatgaggatgtgcatgggctcacgaaggtcgttcatctgccgcatgaggtgtggtactagctccgtggaccctgtttccatgaatagactgagctttttgaggaacagatgcaggaatgggcttggctctgtgaaggaaggagaacctcactttgtggtagtccactgcacaggctacatcaaggcctggccaccagcaggtgtctccctcccagatgatgacccagaggctggccaggggagcaaattctgcctagtggccattggcaggctgcaggcaataactagttctcccaactgtacagacatgagtaacatttgtcagccaacagagttcatctcccgacacaacattgaagggatattcacttttgtagaccatcgttgtgtggctactgttggctaccagccacaggagctcttagggaagaatattgtagaattttgtcatcctgaagaccaacaacttctaagagacagctttcagcaggtggtgaaattaaaaggtcaggtgctgtccgtcatgttccgattccgatctaagacccgagaatggctgtggatgagaacgagctcctttaccttccaaaacccttattcagatgaaattgagtatattatctgcaccaacaccaatgtgaagaactctagccaggaaccacggcctacactgtccaacaccatcccaaggtcacagctaggtccgacagccaatttatccctagagatgggtacagggcagctgccatccaggcagcagcagcagcagcacacagaactggatatggtaccaggaagagatgggctggccagctataatcattcccaggtttctgtccagcctgtggcaagtgcaggatcagaacacagcaagccccttgagaagtcagaaggtctctttgcacaggacagagatccaaggtttccagaaatctatcccagcatcactgcagatcagagtaaaggcatctcctccagcactgtccctgccacccaacagctgttctcccagggcagctcattccctcctaacccccggccggcagagaatttcaggaatagtggtcttacccctcctgtaaccattgtccagccatcatcttctgcagggcagatactggcccagatttcacgtcactccaaccctgcccagggatcagcgccgacctggacctctagctcccgcccaggctttgccgcccagcaggtgcccacccaggctacagccaagactcgttcttcccaatttggtgtgaacaactttcagacttcttcctccttcagtgctatgtctcttccgggtgctcccactgcctcatctggtactgctgcctaccctgctctccccaaccgtggctccaactttcctcctgagactggacagaccacaggacagttccaggcccggacagcagagggcgtgggtgtctggccacagtggcagggccagcagccccatcatcggtctagttccagtgagcagcatgttcagcagacacaagcacaagcacctagccagcctgaggtctttcaagaaatgctgtccatgctgggagaccaaagcaacacctacaacaatgaagaatttcctgatctaactatgtttccccccttttccgaatagaactattggggtgaggataagggtggggggaaatcactgtttgtttttaaaagcaaatcttttgtaaacagaataaaagttcctctcccttcccttccctcacccctgatatgtaccctttccaccccttgacttgctgaagaaacgttatagaagaaattaaatgaatttcccaggc

SEQ ID NO: 5 - DNA, 7086 bp, Human
tggattatgatttttgtttatttttcctgtttatccatatattatttttcaacaatgagtattgattacttatataataattttaaggctgtacacattgcagacagcaccccactgtttgaaaaactcctcctcagtagaacatggcagaccttcatcttccttccctgaaccttttccaaccttaggcttgccattctccaccagtgctaatgtcatgtctcttgaaatctgtattgaagtcagtatttcattcttgccagtttccactgtgtgtttaaatttggagtctggtgtctagcattagctggggttggagcttccactcctctcagcattggtaagcctcctcacccaccccatcccatgtccaagatcacccagttacacacttaccatctacccagttcattcacatcatcagtcccagagctgcagagatgctctttttctacctcctacttctctggctcttagagaggcagcatgggataatggggcaagcgaatagggccttaaagtagagggacaagggttctcttccctatctgccacttattagctatgtgacctcgtgtaagtctcttttctttttgagacagggtctccctctgtcacctaggctggagtacagtggtatgatcatagctcactgcagcctcgaactcctgggctcaagctatccttccaccttagccttctgagcagcagggactacaggcacatgccaccatgtccggctgatttatttatttttatttgggaagatgggggtctcactatgtcgcccaggctggtcatgaactcctggtctcaagcaaccctccaaccttggactcccaaagtgctgggattacaggtgtgagccctggccttgcctcaatttcctcatctgtaaaacggggttagtgaaactcacatcctatcagtggttttgaggatgggccgactcttgtattgcctgctctagtacaatcagcagctaaggcggctcactttccggccgtgctacaataggtaagaactaggatgctttagacgtgtgactgggcagtgggagcccctcacatgatcccgagatgccagacagtgtctctccgcacagggcgtgtgctggtccagaggcccgtttttccagtcgccccacaccccgggtccgcgatcacgctccccccacccatagccgagcctgacgcggcggtggctcatgcgcctttccgtcccagcctttagccacggaccacacgtcccatctcaggcgccccgcccctcccccgccccccgcccccggcgcgcctccccaggctgccggctccggtgtctgagcggccgcgcccgcgagccgtgagcgatgattggctgcgccacggcggcgggcggtccgtgggcgcacacaccctccccgcgcagccaatgggcgtgcgcacgtcactgatccggaggcccgcgggccggcagcccctcaataagccacattgttgcatgaaactccggcgcaggagtcccgggctgccgctggcaacatcgtgtcacccagctaagaaaatccgcgggcccgagccacgcgcctgtgaatcggagaggtcccactgcccgagtggagccgggctgagattcttctcaagttgagcctcagtgatcctgtggccgaagttagcgccttgacgtgggacaaccggacacgtcgccaggagagaactgaggcgccttctagcagttgtgacgccaaaatcacgtctccggagacccgcgccctccgccagccgggcgcaccctcgccggtagccttctttgtgcgccgtccggactcccagctcccggcccggcagccgagccccagcacaaagcagtcggaccgcgccgcccgcctcccctctcgcgtctccgcctcggtttcccaactctgcgccgtcgggccgcggcaggatgattgcctcgcatctgcttgcctacttcttcacggagctcaaccatgaccaagtgcagaaggttgaccagtatctctaccacatgcgcctctctgatgagaccctcttggagatctctaagcggttccgcaaggagatggagaaagggcttggagccaccactcaccctactgcagcagtgaagatgctgcccacctttgtgaggtccactccagatgggacagaacacggagagttcctggctctggatcttggagggaccaacttccgtgtgctttgggtgaaagtaacggacaatgggctccagaaggtggagatggagaatcagatctatgccatccctgaggacatcatgcgaggcagtggcacccagctgtttgaccacattgccgaatgcctggctaacttcatggataagctacaaatcaaagacaagaagctcccactgggttttaccttctcgttcccctgccaccagactaaactagacgagagtttcctggtctcatggaccaagggattcaagtccagtggagtggaaggcagagacgttgtggctctgatccggaaggccatccagaggagaggggactttgatatcgacattgtggctgtggtgaatgacacagttgggaccatgatgacctgtggttatgatgaccacaactgtgagattggtctcattgtgggcacgggcagcaacgcctgctacatggaagagatgcgccacatcgacatggtggaaggcgatgaggggcggatgtgtatcaatatggagtggggggccttcggggacgatggctcgctcaacgacattcgcactgagtttgaccaggagattgacatgggctcactgaacccgggaaagcaactgtttgagaagatgatcagtgggatgtacatgggggagctggtgaggcttatcctggtgaagatggccaaggaggagctgctctttggggggaagctcagcccagagcttctcaacaccggtcgctttgagaccaaagacatctcagacattgaaggggagaaggatggcatccggaaggcccgtgaggtcctgatgcggttgggcctggacccgactcaggaggactgcgtggccactcaccggatctgccagatcgtgtccacacgctccgccagcctgtgcgcagccaccctggccgccgtgctgcagcgcatcaaggagaacaaaggcgaggagcggctgcgctctactattggggtcgacggttccgtctacaagaaacacccccattttgccaagcgtctacataagaccgtgcggcggctggtgcccggctgcgatgtccgcttcctccgctccgaggatggcagtggcaaaggtgcagccatggtgacagcagtggcttaccggctggccgatcaacaccgtgcccgccagaagacattagagcatctgcagctgagccatgaccagctgctggaggtcaagaggaggatgaaggtagaaatggagcgaggtctgagcaaggagactcatgccagtgcccccgtcaagatgctgcccacctacgtgtgtgctaccccggacggcacagagaaaggggacttcttggccttggaccttggaggaacaaatttccgggtcctgctggtccgtgttcggaatgggaagtggggtggagtggagatgcacaacaagatctacgccatcccgcaggaggtcatgcacggcaccggggacgagctctttgaccacattgtccagtgcatcgcggacttcctcgagtacatgggcatgaagggcgtgtccctgcctctgggttttaccttctccttcccctgccagcagaacagcctggacgagagcatcctcctcaagtggacaaaaggcttcaaggcatctggctgcgagggcgaggacgtggtgaccctgctgaaggaagcgatccaccggcgagaggagtttgacctggatgtggttgctgtggtgaacgacacagtcggaactatgatgacctgtggctttgaagaccctcactgtgaagttggcctcattgttggcacgggcagcaatgcctgctacatggaggagatgcgcaacgtggaactggtggaaggagaagaggggcggatgtgtgtgaacatggaatggggggccttcggggacaatggatgcctagatgacttccgcacagaatttgatgtggctgtggatgagctttcactcaaccccggcaagcagaggttcgagaaaatgatcagtggaatgtacctgggtgagattgtccgtaacattctcatcgatttcaccaagcgtggactactcttccgaggccgcatctcagagcggctcaagacaaggggcatctttgaaaccaagttcttgtctcagattgagagtgactgcctggccctgctgcaagtccgagccatcctgcaacacttagggcttgagagcacctgtgacgacagcatcattgttaaggaggtgtgcactgtggtggcccggcgggcagcccagctctgtggcgcaggcatggccgctgtggtggacaggatacgagaaaaccgtgggctggacgctctcaaagtgacagtgggtgtggatgggaccctctacaagctacatcctcactttgccaaagtcatgcatgagacagtgaaggacctggctccgaaatgtgatgtgtctttcctgcagtcagaggatggcagcgggaagggggcggcgctcatcactgctgtggcctgccgcatccgtgaggctggacagcgatagaacccctgaaatcggaagggacttcctctttctctccttcttccctgttttaaattataagatgtcatccccttgtgtcagagacagaccccttggcttttgcttggcagagaggaccccactggactgggttttgtctctgcatctcattgtagagcttggtggctgagcttggccctattaagataaatagagttccaaataaggatttgttcacatgcatcataaccattcccattggttctcctaaaacatgaaaattatctcccttagtaatcccccttgccaaattccatgtccctgtataattctacaggatggggacactaatgaagatacggttgcttcaccttggagcctgaacatgacatttctaagtggggtgcatcccccagcactgatgttgttactgattctcctgtcagagatctgggaggtctccactgaggatgtgagcctgattatcctataggcagacgtggggagggtggaggggtgacagtggaggaaaatccatggatatccacgcagcagcccctctttaacctcatctacaagcatttgccctgtggattccagcatttgccattcctggaatcaaggaatcctgagtctgggcaatgaaaccaaagccaggagttgacgcatcctgcagttgggccagctgtcgcatctcagcggggcgcacatgttatccacaagcaatggacctttggggaagggggagtttttagtttgttttacaaatttttcctgcaaaagtggaatcactgtattttcattttaatttatatttgaaattttatttagttcttgagtagatctgcttcttcatcttgacatgtaatgaatggtcagttgtacgtaatgtatttatatgttaatttgttatgtatatagatgtgcaagtcttgtcagaattggcctcagtgtagttaaagggcagaaggggaagatactgactagtcatagaaatacctcattcgcctgtgggaagagaagggaagcctcttcagggtgagtgaatggcaaagcggttgcttctggctcctccttcccctgtggtcttggaagtgtgtggaaggcagggacagagatggaggccgagccaatagactgaagagaccacagcaattggctcctccatctagagattttcttggcagtattccatgggatgttaagcaaaggaaaccaaaggaatcgtttcaaatggactcatggcttagaaatctttattcttagggcagtcagtagtattctaaagctttctgacaagataaaggaagtcaccaaaatttctttttttaaattgtatctaatcctcaacaacaaaccaaaacagaacaattaaacagccaaataaaacctcagggacaacatttttggtgtatttgagccctcccagcaagtttcaccttgggtttgtattttaaatgttttacaagaattgtccatgtgcttccctaggctgagctggcattggtctgctgacctgtttttgtgtttttcttttttttatacacaacatttatttcaaactattgggagggatgagagtggcttaaaaacttccatccctacttttcaagagtgcagttgattctgaatctgaaagcccgcctctgtcctaaaatacaaacaagcacagacattaaacctggatactatatgataaagagggatgtaactattgaattggatacaaggatcagaatggaaagaaactcacgatgaaattgaacctggtttttgtatatttatcaaacttgtgctgagaatagtgtctgattatacgacttttaagcaaagttgggtgtaattaggtgaaaacagcccaggtcctcccgggagcacagaggggctaggggctggtccttctcgtttgctctagtcttgctttgctgtctggtgtagctcctctgctgctcccatctgcactaattgacccaaaacgtgggtatttcctgctacacaaaagccaaaaggtttcatgtagattttagttcactaaagggtgcccacaaaatagagattaattttaacttaaattttaagcttgaagattaggtactatctgtgaagttacacttttttttttttttttaaaggtagagatgtgtgtgtgtgtaggtattaaagatgtgttgttggtttccaaaaaggaacactggaaaataaattttgaatgtttatgttctcagaatcaggttgacagtcccttgctgacatggctttgctttgtgtaaatacagtggatctcaatcttcggggtgtgatgaatagcgaatcatctcaaatccttgagcactcagtctagtgaagatgttgtcattatgtacaatacataactagtttaattaactatgtgatgttaactattattaataaattttaacattttcc

SEQ ID NO: 6 - DNA, 3600 bp, Human
tggattatgatttttgtttatttttcctgtttatccatatattatttttcaacaatgagtattgattacttatataataattttaaggctgtacacattgcagacagcaccccactgtttgaaaaactcctcctcagtagaacatggcagaccttcatcttccttccctgaaccttttccaaccttaggcttgccattctccaccagtgctaatgtcatgtctcttgaaatctgtattgaagtcagtatttcattcttgccagtttccactgtgtgtttaaatttggagtctggtgtctagcattagctggggttggagcttccactcctctcagcattggtaagcctcctcacccaccccatcccatgtccaagatcacccagttacacacttaccatctacccagttcattcacatcatcagtcccagagctgcagagatgctctttttctacctcctacttctctggctcttagagaggcagcatgggataatggggcaagcgaatagggccttaaagtagagggacaagggttctcttccctatctgccacttattagctatgtgacctcgtgtaagtctcttttctttttgagacagggtctccctctgtcacctaggctggagtacagtggtatgatcatagctcactgcagcctcgaactcctgggctcaagctatccttccaccttagccttctgagcagcagggactacaggcacatgccaccatgtccggctgatttatttatttttatttgggaagatgggggtctcactatgtcgcccaggctggtcatgaactcctggtctcaagcaaccctccaaccttggactcccaaagtgctgggattacaggtgtgagccctggccttgcctcaatttcctcatctgtaaaacggggttagtgaaactcacatcctatcagtggttttgaggatgggccgactcttgtattgcctgctctagtacaatcagcagctaaggcggctcactttccggccgtgctacaataggtaagaactaggatgctttagacgtgtgactgggcagtgggagcccctcacatgatcccgagatgccagacagtgtctctccgcacagggcgtgtgctggtccagaggcccgtttttccagtcgccccacaccccgggtccgcgatcacgctccccccacccatagccgagcctgacgcggcggtggctcatgcgcctttccgtcccagcctttagccacggaccacacgtcccatctcaggcgccccgcccctcccccgccccccgcccccggcgcgcctccccaggctgccggctccggtgtctgagcggccgcgcccgcgagccgtgagcgatgattggctgcgccacggcggcgggcggtccgtgggcgcacacaccctccccgcgcagccaatgggcgtgcgcacgtcactgatccggaggcccgcgggccggcagcccctcaataagccacattgttgcatgaaactccggcgcaggagtcccgggctgccgctggcaacatcgtgtcacccagctaagaaaatccgcgggcccgagccacgcgcctgtgaatcggagaggtcccactgcccgagtggagccgggctgagattcttctcaagttgagcctcagtgatcctgtggccgaagttagcgccttgacgtgggacaaccggacacgtcgccaggagagaactgaggcgccttctagcagttgtgacgccaaaatcacgtctccggagacccgcgccctccgccagccgggcgcaccctcgccggtagccttctttgtgcgccgtccggactcccagctcccggcccggcagccgagccccagcacaaagcagtcggaccgcgccgcccgcctcccctctcgcgtctccgcctcggtttcccaactctgcgccgtcgggccgcggcaggatgattgcctcgcatctgcttgcctacttcttcacggagctcaaccatgaccaagtgcagaaggttgaccagtatctctaccacatgcgcctctctgatgagaccctcttggagatctctaagcggttccgcaaggagatggagaaagggcttggagccaccactcaccctactgcagcagtgaagatgctgcccacctttgtgaggtccactccagatgggacagaacacggagagttcctggctctggatcttggagggaccaacttccgtgtgctttgggtgaaagtaacggacaatgggctccagaaggtggagatggagaatcagatctatgccatccctgaggacatcatgcgaggcagtggcacccagctgtttgaccacattgccgaatgcctggctaacttcatggataagctacaaatcaaagacaagaagctcccactgggttttaccttctcgttcccctgccaccagactaaactagacgagagtttcctggtctcatggaccaagggattcaagtccagtggagtggaaggcagagacgttgtggctctgatccggaaggccatccagaggagaggggactttgatatcgacattgtggctgtggtgaatgacacagttgggaccatgatgacctgtggttatgatgaccacaactgtgagattggtctcattgtgggcacgggcagcaacgcctgctacatggaagagatgcgccacatcgacatggtggaaggcgatgaggggcggatgtgtatcaatatggagtggggggccttcggggacgatggctcgctcaacgacattcgcactgagtttgaccaggagattgacatgggctcactgaacccgggaaagcaactgtttgagaagatgatcagtgggatgtacatgggggagctggtgaggcttatcctggtgaagatggccaaggaggagctgctctttggggggaagctcagcccagagcttctcaacaccggtcgctttgagaccaaagacatctcagacattgaaggggagaaggatggcatccggaaggcccgtgaggtcctgatgcggttgggcctggacccgactcaggaggactgcgtggccactcaccggatctgccagatcgtgtccacacgctccgccagcctgtgcgcagccaccctggccgccgtgctgcagcgcatcaaggagaacaaaggcgaggagcggctgcgctctactattggggtcgacggttccgtctacaagaaacacccccattttgccaagcgtctacataagaccgtgcggcggctggtgcccggctgcgatgtccgcttcctccgctccgaggatggcagtggcaaaggtgcagccatggtgacagcagtggcttaccggctggccgatcaacaccgtgcccgccagaagacattagagcatctgcagctgagccatgaccagctgctggaggtcaagaggaggatgaaggtagaaatggagcgaggtctgagcaaggagactcatgccagtgcccccgtcaagatgctgcccacctacgtgtgtgctaccccggacggcacagagaaaggggacttcttggccttggaccttggaggaacaaatttccgggtcctgctggtccgtgttcggaatgggaagtggggtggagtggagatgcacaacaag

SEQ ID NO: 7 - DNA, 3486 bp, Human
atctacgccatcccgcaggaggtcatgcacggcaccggggacgagctctttgaccacattgtccagtgcatcgcggacttcctcgagtacatgggcatgaagggcgtgtccctgcctctgggttttaccttctccttcccctgccagcagaacagcctggacgagagcatcctcctcaagtggacaaaaggcttcaaggcatctggctgcgagggcgaggacgtggtgaccctgctgaaggaagcgatccaccggcgagaggagtttgacctggatgtggttgctgtggtgaacgacacagtcggaactatgatgacctgtggctttgaagaccctcactgtgaagttggcctcattgttggcacgggcagcaatgcctgctacatggaggagatgcgcaacgtggaactggtggaaggagaagaggggcggatgtgtgtgaacatggaatggggggccttcggggacaatggatgcctagatgacttccgcacagaatttgatgtggctgtggatgagctttcactcaaccccggcaagcagaggttcgagaaaatgatcagtggaatgtacctgggtgagattgtccgtaacattctcatcgatttcaccaagcgtggactactcttccgaggccgcatctcagagcggctcaagacaaggggcatctttgaaaccaagttcttgtctcagattgagagtgactgcctggccctgctgcaagtccgagccatcctgcaacacttagggcttgagagcacctgtgacgacagcatcattgttaaggaggtgtgcactgtggtggcccggcgggcagcccagctctgtggcgcaggcatggccgctgtggtggacaggatacgagaaaaccgtgggctggacgctctcaaagtgacagtgggtgtggatgggaccctctacaagctacatcctcactttgccaaagtcatgcatgagacagtgaaggacctggctccgaaatgtgatgtgtctttcctgcagtcagaggatggcagcgggaagggggcggcgctcatcactgctgtggcctgccgcatccgtgaggctggacagcgatagaacccctgaaatcggaagggacttcctctttctctccttcttccctgttttaaattataagatgtcatccccttgtgtcagagacagaccccttggcttttgcttggcagagaggaccccactggactgggttttgtctctgcatctcattgtagagcttggtggctgagcttggccctattaagataaatagagttccaaataaggatttgttcacatgcatcataaccattcccattggttctcctaaaacatgaaaattatctcccttagtaatcccccttgccaaattccatgtccctgtataattctacaggatggggacactaatgaagatacggttgcttcaccttggagcctgaacatgacatttctaagtggggtgcatcccccagcactgatgttgttactgattctcctgtcagagatctgggaggtctccactgaggatgtgagcctgattatcctataggcagacgtggggagggtggaggggtgacagtggaggaaaatccatggatatccacgcagcagcccctctttaacctcatctacaagcatttgccctgtggattccagcatttgccattcctggaatcaaggaatcctgagtctgggcaatgaaaccaaagccaggagttgacgcatcctgcagttgggccagctgtcgcatctcagcggggcgcacatgttatccacaagcaatggacctttggggaagggggagtttttagtttgttttacaaatttttcctgcaaaagtggaatcactgtattttcattttaatttatatttgaaattttatttagttcttgagtagatctgcttcttcatcttgacatgtaatgaatggtcagttgtacgtaatgtatttatatgttaatttgttatgtatatagatgtgcaagtcttgtcagaattggcctcagtgtagttaaagggcagaaggggaagatactgactagtcatagaaatacctcattcgcctgtgggaagagaagggaagcctcttcagggtgagtgaatggcaaagcggttgcttctggctcctccttcccctgtggtcttggaagtgtgtggaaggcagggacagagatggaggccgagccaatagactgaagagaccacagcaattggctcctccatctagagattttcttggcagtattccatgggatgttaagcaaaggaaaccaaaggaatcgtttcaaatggactcatggcttagaaatctttattcttagggcagtcagtagtattctaaagctttctgacaagataaaggaagtcaccaaaatttctttttttaaattgtatctaatcctcaacaacaaaccaaaacagaacaattaaacagccaaataaaacctcagggacaacatttttggtgtatttgagccctcccagcaagtttcaccttgggtttgtattttaaatgttttacaagaattgtccatgtgcttccctaggctgagctggcattggtctgctgacctgtttttgtgtttttcttttttttatacacaacatttatttcaaactattgggagggatgagagtggcttaaaaacttccatccctacttttcaagagtgcagttgattctgaatctgaaagcccgcctctgtcctaaaatacaaacaagcacagacattaaacctggatactatatgataaagagggatgtaactattgaattggatacaaggatcagaatggaaagaaactcacgatgaaattgaacctggtttttgtatatttatcaaacttgtgctgagaatagtgtctgattatacgacttttaagcaaagttgggtgtaattaggtgaaaacagcccaggtcctcccgggagcacagaggggctaggggctggtccttctcgtttgctctagtcttgctttgctgtctggtgtagctcctctgctgctcccatctgcactaattgacccaaaacgtgggtatttcctgctacacaaaagccaaaaggtttcatgtagattttagttcactaaagggtgcccacaaaatagagattaattttaacttaaattttaagcttgaagattaggtactatctgtgaagttacacttttttttttttttttaaaggtagagatgtgtgtgtgtgtaggtattaaagatgtgttgttggtttccaaaaaggaacactggaaaataaattttgaatgtttatgttctcagaatcaggttgacagtcccttgctgacatggctttgctttgtgtaaatacagtggatctcaatcttcggggtgtgatgaatagcgaatcatctcaaatccttgagcactcagtctagtgaagatgttgtcattatgtacaatacataactagtttaattaactatgtgatgttaactattattaataaattttaacattttcc

SEQ ID NO: 8 - DNA, 5491 bp, Mouse
gccacattgttgcaccaactccagtgctggagtctcaggacaccacaggctacccggagttgttctgctttggagatccgagggcaggagcatcacgccagtgactctgataggtgcgatcgccggattggaacagaactgtcatttttttccgaagttgagccttagtgacccagtgagtgaagttagcgacgggacgctaagcagctagaccggtcggcaggagtgagacttagggtaccttctagtagttgtgattaaaaaaattgaaaaaaagaaaaaaaaaaaccctgtttctggaaacttgaggccctcagctggtgagccatcgtggttaagcttctttgtgtggctcctggagtcttcgatcccagccggacacccgggcctggtttcaaagcggtcggacagcgctgcctgctccatcggtagcgctcgagcctcggtttctctatttggccccgactcgccgcaacaagatgatcgcctcgcatatgatcgcctgcttattcacggagctcaaccaaaaccaagtgcagaaggttgaccagtatctctaccacatgcgtctctcagatgagacccttctggagatttctaggcggttccggaaggagatggagaaggggctaggagctaccacacaccctacagcagctgtgaagatgctgcccacctttgtgaggtcaactccggatgggacagaacatggcgagttcctggctctggaccttggaggaaccaacttccgtgtgctccgagtaagggtgacagacaatggtctccagagggtggagatggagaaccagatctacgccattcccgaggacatcatgcggggcagtggaacccagctgtttgaccacattgccgaatgcctggccaacttcatggacaagctacagatcaaagagaagaagctcccgctgggtttcaccttctcgttcccctgccaccagacgaaactggatgagagtttcttggtctcatggactaaggggttcaagtccagtggcgtggaaggcagagatgtggtggatctgatccggaaggccatccagcgcagaggggactttgacattgacattgtggctgtggtgaatgacacggttgggaccatgatgacttgtggttatgatgatcagaactgcgagattggtctcattgtgggtactggcagtaatgcctgctacatggaggagatgcgtcacattgacatggtggagggcgacgagggacggatgtgcatcaacatggagtggggggcctttggggacgacggtacactcaatgacatccgaactgagtttgacagagagatcgacatgggctcactgaaccctgggaagcagctgtttgagaagatgatcagcgggatgtacatgggggagctggtcagactcatcctggtgaagatggccaaggccgagctgctgttccaagggaaactcagcccagagctccttaccactggctccttcgagaccaaagatgtctcggatattgaagacgataaggacggaattcagaaggcctaccagatcctggtgcgcctgggtctgagcccgctgcaggaggactgtgtggccacgcaccgaatctgccagattgtgtccacgcgctcagccagcctgtgtgcagccaccctggccgcggtgctgtggcggatcaaagagaacaagggcgaggagcgactccgctccaccatcggcgtggatggctctgtctacaagaaacatccccattttgccaagcgtctccataaggcagtgaggaggctggtgcccgattgtgatgtccgcttcctccgctctgaggatggcagcggcaagggggcggctatggtgacggcggtggcttaccgtctggctgaccaacaccgggcccgccagaagaccctggagtctctgaagctgagccatgaacagctgctggaggttaagagaaggatgaaggtggaaatggagcagggtctgagcaaggagacgcatgaggccgcccctgtgaagatgttgcccacttatgtgtgtgccactccagacggtacagagaaaggagacttcctggccttggatcttggaggaacaaacttccgggtcctgctggtgcgcgtgcgtaatggcaagcgaaggggcgtagagatgcataacaagatctactccatcccacaggaagtcatgcatggcactggagaagagcttttcgaccacattgtccagtgcatcgcggacttccttgagtacatgggcatgaagggcgtgtccctacctttgggtttcaccttctccttcccttgccagcagaacagcctggaccagagcatcctcctcaagtggacaaagggattcaaggcatccggctgcgagggtgaagatgtggtcaccttgctgaaggaagccattcgccggcgagaggagtttgacctggatgtggtggccgtggtaaatgacacagttgggactatgatgacttgtggctatgaagaccctcactgtgaagttggcctcattgttggcactggaagcaatgcctgctacatggaggagatgcgtaatgtggaactggtggacggagaggaggggcggatgtgtgtcaacatggagtggggagcgttcggggacaacggctgcctggatgacctgcgcacagtgtttgacgtcgctgtggacgagctctctctcaaccctggcaaacagaggtttgagaagatgatcagcggcatgtacttgggcgagattgtgcgcaacatcctgatcgatttcacaaagcgggggctgctcttccgtggccgcatctcagagcgcctcaagacaaggggaatcttcgaaactaagttcctgtctcagatcgagagtgactgcctggccctgctacaggtccgagccatcttgcgccacctagggctggagagcacgtgtgacgacagcatcattgtgaaggaggtgtgcactgtggtcgcccggcgcgcggcccagctctgtggcgcaggcatggccgccgtggtggacaagataagagagaaccgtggactggacaacctcaaagtgacggtgggcgtggacgggacactgtacaagcttcatcctcactttgccaaagtcatgcatgagacggtgagagatctggctccgaaatgtgacgtgtccttcctggaatccgaggacggcagtgggaagggagcggctctcatcactgctgtggcctgtcgcatccgggaggccgggcagagatagaaccttggagcagacgggacttccctgcttcctcacttccctgttttaaattatgaggagatggacctcttggcatttccttggcagagaggaccccgagagactgggacttttgtcccgatattcactgtagagtttgatacccaatccttggccttcctgagaatcagaagtaaggaattgttcacaagttgttcctgctggtcacttcctggcatgttccctcccctgttctacttcctgtacagtcctatgggatggggacagtcttgcgaatatggttgcctcatcttggagctgaatgcgacatttataggtggagaacatcttgaaatgttgatacttctgtcatcagatcaggcattgggagggagggaggaggaggaggaagaggaggaggaggaggagcagtagtggaacgtcccctggcctacatggctgtccctcttcagctcaacctgtaggcatcaccctgctggttctaaacatttgctgtcctggaatagaggaacccaaaccaaagctagactcgacacccccttcaagtgtctgtggctttacctcacacggctgaacgggtcatctatgagcagcagaccttggggctaggggtggctttggtagcttttcaatttcttttttttttttttttttaatttatgtttgaaatttatttagtttgaagcaggtcctctccttcattgtgtaatggttaattatgtaagtaatgtatttatatgttcctttgttctgtatatagctggccagggtctcctctgactcggccttgtgagtagatagatcattgtagttcaggatatgaggtggagacactgactggctctagaaatacctcattcacccgcgggaagaagagagactcggaatctcttggtgagtgatgggcagagcgccaccagcctccgggcttcaccttcctctgctccgtgaggtgtatgcgaggcagggatggagacagggtggttcgctgagggaaagaagccacaacacctggctgctccgtccagaagctttcctgagtgaggtctcacccgggatgttaggcaaagaaaaccaaaggatttgtttcaagttctcactgcatagaagatgtgatttttaggtcagtcggcgtttcagaatggtttgacaagttacaggaagccagcgaaaatgtttttaaagtcacatcagatcgttggagcagaccacatgaagcatcgagagaactcgaccaaacctcaggggcgtctcggggtgtttgtacatttatttgccctcctagcagatcccacctccggtgtgtctcgtgttttacacgagatgcacgctgtctgtctgcttccttggactgagctgcatcgagctgccgactagcctttttatacgagttatttattccagactgtttgaagaacgggaagacaccaatgtcctgttctctgctctaccaacacggttcgctctgaattcaaaagttcacttctcccttcaaaatattaaattgaccaccaatgttaaacctggataggtttaataaagaggaaacagccttgtaacactaataaacaagatacgggggtcaaaagagaaagaccaagagaaagctcagcatcgtggcagccatgttttgaacatctttcagacttgtgctgagcagagcctagttacaaccgaacaagctggtgtacagtgaaatgaaggctgcccaggtcctcccgggatgcccagagggaaggtcgagtgattcctgcctgatactgcctgtctggtgtagctccctcaacctgcagttaccgaagcagaccactgaaagccgaagccacctatagatgtgtgcagcactagggggtagccacctatagatgtgtgcagcactagagggtagccacggagtacaaatggattctgactaaattttcgaatcttgaattttaaactttaaaatcaagcaccatctaggaaaggacttttttttaaaaaggggtgtgtgtgtatgtgtgtgtgtgtgtgtgtgtgtctaacttttaaggaagttggctttcaatccagagcatgagacagtgtgctgtgttcctagtactaggctggctactgccagcactaggttgacagctctctctgctaatgctgctttgtgtgatcttcagtgaacctttgactcatctcatatccctgggcactcggtctagtgagcgttttgtcatcatgtacagtagagaactagttgaattaaccatgtgatgttaactattatt

SEQ ID NO: 9 - DNA, 1665 bp, Human
agagtgctgcagccgctgccgccgattccggatctcattgccacgcgcccccgacgaccgcccgacgtgcattcccgattccttttggttccaagtccaatatggcaactctaaaggatcagctgatttataatcttctaaaggaagaacagaccccccagaataagattacagttgttggggttggtgctgttggcatggcctgtgccatcagtatcttaatgaaggacttggcagatgaacttgctcttgttgatgtcatcgaagacaaattgaagggagagatgatggatctccaacatggcagccttttccttagaacaccaaagattgtctctggcaaagactataatgtaactgcaaactccaagctggtcattatcacggctggggcacgtcagcaagagggagaaagccgtcttaatttggtccagcgtaacgtgaacatctttaaattcatcattcctaatgttgtaaaatacagcccgaactgcaagttgcttattgtttcaaatccagtggatatcttgacctacgtggcttggaagataagtggttttcccaaaaaccgtgttattggaagcggttgcaatctggattcagcccgattccgttacctaatgggggaaaggctgggagttcacccattaagctgtcatgggtgggtccttggggaacatggagattccagtgtgcctgtatggagtggaatgaatgttgctggtgtctctctgaagactctgcacccagatttagggactgataaagataaggaacagtggaaagaggttcacaagcaggtggttgagagtgcttatgaggtgatcaaactcaaaggctacacatcctgggctattggactctctgtagcagatttggcagagagtataatgaagaatcttaggcgggtgcacccagtttccaccatgattaagggtctttacggaataaaggatgatgtcttccttagtgttccttgcattttgggacagaatggaatctcagaccttgtgaaggtgactctgacttctgaggaagaggcccgtttgaagaagagtgcagatacactttgggggatccaaaaggagctgcaattttaaagtcttctgatgtcatatcatttcactgtctaggctacaacaggattctaggtggaggttgtgcatgttgtcctttttatctgatctgtgattaaagcagtaatattttaagatggactgggaaaaacatcaactcctgaagttagaaataagaatggtttgtaaaatccacagctatatcctgatgctggatggtattaatcttgtgtagtcttcaactggttagtgtgaaatagttctgccacctctgacgcaccactgccaatgctgtacgtactgcatttgccccttgagccaggtggatgtttaccgtgtgttatataacttcctggctccttcactgaacatgcctagtccaacattttttcccagtgagtcacatcctgggatccagtgtataaatccaatatcatgtcttgtgcataattcttccaaaggatcttattttgtgaactatatcagtagtgtacattaccatataatgtaaaaagatctacatacaaacaatgcaaccaactatccaagtgttataccaactaaaacccccaataaaccttgaacagtg

SEQ ID NO: 10 - DNA, 957 bp, Mouse
aaggaccagctgattgtgaatcttcttaaggaagagcaggctccccagaacaagattacagttgttggggttggtgctgttggcatggcttgtgccatcagtatcttaatgaaggacttggcggatgagcttgcccttgttgacgtcatggaagacaaactcaagggcgagatgatggatctccagcatggcagcctcttccttaaaacaccaaaaattgtctccagcaaagactactgtgtaactgcgaactccaagctggtcattatcaccgcgggggcccgtcagcaagagggggagagccggctcaacctggtccagcgaaacgtgaacatcttcaagttcatcattcccaacattgtcaagtacagtccacactgcaagctgctgatcgtctccaatccagtggatatcttgacctacgtggcttggaaaatcagtggctttcccaaaaaccgagtaattggaagtggttgcaatctggattcagcgcggttccgttacctgatgggagagaggctgggggttcacgcgctgagctgtcacggctgggtcctgggagaacatggcgactccagtggaccaaaacagcttatggaaggcgttgttttgggctcctggttcccaagggtgagagaccacagaggctgggcagagagggatgagcatgcctacgaggtgatcaagctgaaaggttacacatcctgggccattggcctctctgtggcagacttggctgagagcataatgaagaaccttaggcgggtgcatcccatttccaccatgattaagggtctctatggaatcaatgaggatgtcttcctcagtgtcccatgtatcctgggacaaaatggaatctcggatgttgtgaaggtgacactgactcctgaggaagaggcccgcctgaagaagagcgcagacaccctctggggaatccagaaggagctgcagttctaa

SEQ ID NO: 11 - DNA, 3402 bp, Human
gacggcgacgcggcgcaggcggcgggagtgcgagctgggcccgtgtttcggccgccgccatggccgcggtggacctggagaagctgcgggcgtcgggcgcgggcaaggccatcggcgtcctgaccagcggcggcgacgcgcaaggtcccctgacaagcccaccaggccccctgctgagatggctgtgaccctgggctgacccgcccagtggcacattgactccgcctggagctggggagaccagagaggccctgtggttggacggtggcctgggtgcgctgctcctgccctctccttgccctgcctcagctgctgcctgccagaggcgtggcacctcacctcacacctgctccctgctgctgagccccacgccaagctggagagcggatgagaagcatgtgtaaccagggtagaggtcgagagtcctctcgtgggggtctccatgttcaagggagctgccgaggcttgagcaggagcccccagcaggaaactggctttgccaaggcccccgctgggacagactgtttctttcactgcagtcctgggagccgagggcaaggggacaggaaagaggaagtgacctcagagcctggtggcaccagcatcatgtccaggctggggggcatgaacgctgctgtccgggctgtgacgcgcatgggcatttatgtgggtgccaaagtcttcctcatctacgagggctatgagggcctcgtggagggaggtgagaacatcaagcaggccaactggctgagcgtctccaacatcatccagctgggcggcactatcattggcagcgctcgctgcaaggcctttaccaccagggaggggcgccgggcagcggcctacaacctggtccagcacggcatcaccaacctgtgcgtcatcggcggggatggcagcctcacaggtgccaacatcttccgcagcgagtggggcagcctgctggaggagctggtggcggaaggtaagatctcagagactacagcccggacctactcgcacctgaacatcgcgggcctagtgggctccatcgataacgacttctgcggcaccgacatgaccatcggcacggactcggccctccaccgcatcatggaggtcatcgatgccatcaccaccactgcccagagccaccagaggaccttcgtgctggaagtgatgggccggcactgcgggtacctggcgctggtatctgcactggcctcaggggccgactggctgttcatccccgaggctccacccgaggacggctgggagaacttcatgtgtgagaggctgggtgagactcggagccgtgggtcccgactgaacatcatcatcatcgctgagggtgccattgaccgcaacgggaagcccatctcgtccagctacgtgaaggacctggtggttcagaggctgggcttcgacacccgtgtaactgtgctgggccacgtgcagcggggagggacgccctctgccttcgaccggatcctgagcagcaagatgggcatggaggcggtgatggcgctgctggaagccacgcctgacacgccggcctgcgtggtcaccctctcggggaaccagtcagtgcggctgcccctcatggagtgcgtgcagatgaccaaggaagtgcagaaagccatggatgacaagaggtttgacgaggccacccagctccgtggtgggagcttcgagaacaactggaacatttacaagctcctcgcccaccagaagccccccaaggagaagtctaacttctccctggccatcctgaatgtgggggccccggcggctggcatgaatgcggccgtgcgctcggcggtgcggaccggcatctcccatggacacacagtatacgtggtgcacgatggcttcgaaggcctagccaagggtcaggtgcaagaagtaggctggcacgacgtggccggctggttggggcgtggtggctccatgctggggaccaagaggaccctgcccaagggccagctggagtccattgtggagaacatccgcatctatggtattcacgccctgctggtggtcggtgggtttgaggcctatgaaggggtgctgcagctggtggaggctcgcgggcgctacgaggagctctgcatcgtcatgtgtgtcatcccagccaccatcagcaacaacgtccctggcaccgacttcagcctgggctccgacactgctgtaaatgccgccatggagagctgtgaccgcatcaaacagtctgcctcggggaccaagcgccgtgtgttcatcgtggagaccatggggggttactgtggctacctggccaccgtgactggcattgctgtgggggccgacgccgcctacgtcttcgaggaccctttcaacatccacgacttaaaggtcaacgtggagcacatgacggagaagatgaagacagacattcagaggggcctggtgctgcggaacgagaagtgccatgactactacaccacggagttcctgtacaacctgtactcatcagagggcaagggcgtcttcgactgcaggaccaatgtcctgggccacctgcagcagggtggcgctccaaccccctttgaccggaactatgggaccaagctgggggtgaaggccatgctgtggttgtcggagaagctgcgcgaggtttaccgcaagggacgggtgttcgccaatgccccagactcggcctgcgtgatcggcctgaagaagaaggcggtggccttcagccccgtcactgagctcaagaaagacactgatttcgagcaccgcatgccacgggagcagtggtggctgagcctgcggctcatgctgaagatgctggcacaataccgcatcagtatggccgcctacgtgtcaggggagctggagcacgtgacccgccgcaccctgagcatggacaagggcttctgaggccagccatgcccacgcccctccccagcccccacccatgccagcgcagcgccagggctcagatggggcctgggctgttgtgtctggagcctgcaggcaggtgggggctgcgtccctgctcagcccatcccctgcctctatccctggccacctgccaggcctccctcgggctggtgtcttgagaccagcctgccaggccctccagcaggaggacagagtgccctggggcatccaccttcctgcccaggggacgtggcgctgtcggtgtttggaggctgctgccccctggctttggcgccccatgggccctcagcgtctccccatgctgggctcactacatgggccagcccttgctctacctggccggtaggctgctggcgcctaggttgtgttgagagggggatgcccctggccctgcctcactgtgacctgctcctgcccacgtgcagcacctgtcaccttttctagaaataaaatcaccctgactgtggggtgcatcggtctccggagaaaacaaaaaaa

SEQ ID NO: 12 - DNA, 4497 bp, Human
agccaagccggagaggaggcgagcggcagggcctggtggcgagagcgcggctgtcactgcgcccgagcatcccagagctttccgagcggacgagccggccgtgccgggcatccccagcctcgctaccctcgcagcacacgtcgagccccgcacaggcgagggtccggaacttagcccaaagcacgtttcccctggcagcgcaggaaacgcccggccgcgcgccggcgcacgcccccctctcctcctttgttccgggggtcggcggccgctctcctgccagcgtcgggatctcggccccgggaggcgggccgtcgggcgcagccgcgaagatgccgttggaactgacgcagagccgagtgcagaagatctgggtgcccgtggaccacaggccctcgttgcccagatcctgtgggccaaagctgaccaactcccccaccgtcatcgtcatggtgggcctccccgcccggggcaagacctacatctccaagaagctgactcgctacctcaactggattggcgtccccacaaaagtgttcaacgtcggggagtatcgccgggaggctgtgaagcagtacagctcctacaacttcttccgccccgacaatgaggaagccatgaaagtccggaagcaatgtgccttagctgccttgagagatgtcaaaagctacctggcgaaagaagggggacaaattgcggttttcgatgccaccaatactactagagagaggagacacatgatccttcattttgccaaagaaaatgactttaaggcgtttttcatcgagtcggtgtgcgacgaccctacagttgtggcctccaatatcatggaagttaaaatctccagcccggattacaaagactgcaactcggcagaagccatggacgacttcatgaagaggatcagttgctatgaagccagctaccagcccctcgaccccgacaaatgcgacagggacttgtcgctgatcaaggtgattgacgtgggccggaggttcctggtgaaccgggtgcaggaccacatccagagccgcatcgtgtactacctgatgaacatccacgtgcagccgcgtaccatctacctgtgccggcacggcgagaacgagcacaacctccagggccgcatcgggggcgactcaggcctgtccagccggggcaagaagtttgccagtgctctgagcaagttcgtggaggagcagaacctgaaggacctgcgcgtgtggaccagccagctgaagagcaccatccagacggccgaggcgctgcggctgccctacgagcagtggaaggcgctcaatgagatcgacgcgggcgtctgtgaggagctgacctacgaggagatcagggacacctaccctgaggagtatgcgctgcgggagcaggacaagtactattaccgctaccccaccggggagtcctaccaggacctggtccagcgcttggagccagtgatcatggagctggagcggcaggagaatgtgctggtcatctgccaccaggccgtcctgcgctgcctgcttgcctacttcctggataagagtgcagaggagatgccctacctgaaatgccctcttcacaccgtcctgaaactgacgcctgtcgcttatggctgccgtgtggaatccatctacctgaacgtggagtccgtctgcacacaccgggagaggtcagaggatgcaaagaagggacctaacccgctcatgagacgcaatagtgtcaccccgctagccagccccgaacccaccaaaaagcctcgcatcaacagctttgaggagcatgtggcctccacctcggccgccctgcccagctgcctgcccccggaggtgcccacgcagctgcctggacaaaacatgaaaggctcccggagcagcgctgactcctccaggaaacactgaggcagacgtgtcggttccattccatttccatttctgcagcttagcttgtgtcctgccctccgcccgaggcaaaacgtatcctgaggacttcttccggagagggtggggtggagcagcgggggagccttggccgaagagaaccatgcttggcaccgtctgtgtcccctcggccgctggacaccagaaagccacgtgggtccctggcgccctgcctttagccgtggggcccccacctccaccctctgggtttcctaggaatgtccagcctcggagaccttcacaaagccttgggagggtgatgagtgctggtcctgacaagaggccgctggggacactgtgctgttttgtttcgtttctgtgatctcccggcacgtttggagctgggaagaccacactggtggcagaatcctaaaattaaaggaggcaggctcctagttgctgaaagttaaggaatgtgtaaaacctccacgtgactgtttggtgcatcttgacctgggaagacgcctcatgggaacgaacttggacaggtgttgggttgaggcctcttctgcaggaagtccctgagctgagacgcaagttggctgggtggtccacaccctggctctcctgcaggtccacacaccttccaggcctgtggcctgcctccaaagatgtgcaagggcaggctggctgcacggggagagggaagtattttgccgaaatatgagaactggggcctcctgctcccagggagctccagggcccctctctcctcccacctggacttggggggaactgagaaacactttcctggagctgctggcttttgcacttttttgatggcagaagtgtgacctgagagtcacaccttctcttcaggaacgtagatgttggggtgtcttgccctggggggcttggaacctctgaaggtggggagcggaacacctggcatccttccccagcacttgcattaccgtccctgctcttcccaggtggggacagtggcccaagcaaggcctcactcgcagccacttcttcaagagctgcctgcacactgtcttggagcatctgccttgtgcctggcactctgccggtgccttgggaaggtcggaagagtggactttgtcctggccttcccttcatggcgtctatgacacttttgtggtgatggaaagcatgggacctgtcgtctcagcctgttggtttctcctcattgcctcaaaccctggggtaggtgggacggggggtctcgtgcccagatgaaaccatttggaaactcggcagcagagtttgtccaaatgacccttttcaggatgtctcaaagcttgtgccaaaggtcacttttctttcctgccttctgctgtgagccctgagatcctcctcccagctcaagggacaggtcctgggtgagggtgggagatttagacacctgaaactgggcgtggagagaagagccgttgctgtttgttttttgggaagagcttttaaagaatgcatgtttttttcctggttggaattgagtaggaactgaggctgtgcttcaggtatggtacaatcaagtgggggattttcatgctgaaccattcaagccctccccgcccgttgcacccactttggctggcgtctgctggagaggatgtctctgtccgcattcccgtgcagctccaggctcgcgcagttttctctctctccctggatgttgagtctcatcagaatatgtgggtagggggtggacgtgcacgggtgcatgattgtgcttaacttggttgtatttttcgatttgacatggaaggcctgttgctttgctcttgagaatagtttctcgtgtccccctcgcaggcctcattctttgaacatcaactctgaagtttgatacagataggggcttgatagctgtggtcccctctcccctctgactacctaaaatcaatacctaaatacagaagccttggtctaacacgggacttttagtttgcgaagggcctagatagggagagaggtaacatgaatctggacagggagggagatactatagaaaggagaacactgcctactttgcaagccagtgacctgccttttgaggggacattggacgggggccgggggcgggggttgggtttgagctacagtcatgaacttttggcgtctactgattcctccaactctccaccccacaaaataacggggaccaatatttttaactttgcctatttgtttttgggtgagtttcccccctccttattctgtcctgagaccacgggcaaagctcttcattttgagagagaagaaaaactgtttggaaccacaccaatgatatttttctttgtaatacttgaaatttatttttttattattttgatagcagatgtgctatttatttatttaatatgtataaggagcctaaacaatagaaagctgtagagattgggtttcattgttaattggtttgggagcctcctatgtgtgacttatgacttctctgtgttctgtgtatttgtctgaattaatgacctgggatataaagctatgctagctttcaaacaggagatgcctttcagaaatttgtatattttgcagttgccagaccaataaaatacctggttgaaatacaaaaaaaaaaaaaaaa

SEQ ID NO: 13 - DNA, 1737 bp, Mouse
gaaaggaaaggaagacatgaagagctgaagatgtcccagatccaagggggtgcctgtgggccgaagctgaccaactccccaaccgtgattgtgatggtggggctcccagcccggggtaagacttacatctccaagaagctgactcgctacctcaactggataggtgttccaacgaaagtgttcaatgtgggagagtatcggcgtgaggctgtgaagcagtacagctcttacaacttcttccgccctgacaatgaggaagccatgagagtccgaaaacagtgtgccttagctgccctgagagatgtcaaaagctacctgacaaaggaaggtggacagattgcagtttttgatgccaccaatacaactagagaaagaaggcacatgatccttaattttgccaaagaaaatgacttcaaggcatttttcatcgagtcggtctgtgacgaccctactgttgtggcctccaacatcatggaagttaaaatctccagcccggattacaaagactgcaactcagcagaagccatggacgacttcatgaagagaatcaattgctatgaagccagctaccagcctcttgaccctgataaatgtgacagggacttgtcactcatcaaagtgattgatgttggccggaggttcttggtgaacagagtgcaggaccacatccagagccgaattgtatactacctgatgaacatccacgtgcagccccgtaccatctacctgtgtcggcatggcgagaatgagtacaacttgcagggcaagattgggggcgactcaggcttgtccagcagaggcaagaagttcgccaatgccctgagcaagttcgtagaagaacagaatctgaaggacctccgtgtgtggaccagccagctgaaaagtaccattcagaccgcggaggccctgaggctcccctacgagcagtggaaggcactcaacgagatcgatgctggtgtgtgtgaggaactaacctatgaggagatcagagatacctaccctgaggagtacgcactgcgtgaacaggacaagtactactatcgctatcccacgggagagtcctaccaggatcttgtccaacgcctggagcctgtgatcatggaattagagcgccaagagaatgtattggtcatctgtcaccaggctgttctacgctgcctactagcctacttcctcgacaagagtgcagaggagatgccatacctgaaatgtccgctccacactgtcctgaaactgacacctgtggcatatgggtgccgggtggagtccatttacttgaatgtagaatcggtgagcacacaccgggagaggtcagaggatgcaaagaagggacctaacccgctcatgagacgcaatagtgtcaccccactagccagtcccgagcccaccaaaaagcctcgcatcaacagctttgaggagcgtgtggcttccacttctgctgccctgccaagctgcctgcccccggaagtgcccacgcagctgcccggacaaaacatgaagagctcccggagcggtgccgactcttcccagaagcactaaagccgagatgtgggttccattccatttccacagcctgccttgtgcctgctcatcttctcgaggccaagtgatcgcaaggacttctggactcgggagaatggagggaagaagctttgcaagctttttaacaggacacgccttcctttcagacatctgtgtagtttgcagttgcaagaacaataaaaacctggttgagat

SEQ ID NO: 14 - DNA, 2632 bp, Human
agggacagcccagaggaggcgtggccacgctgccggcggaagtggagccctccgcgagcgcgcgaggccgccggggcaggcggggaaaccggacagtaggggcggggcctggccggcgatggggattcgggagcactacgcggagctgcacccgtgcccgccggaattggggatgcagagcagcggcagcgggtatggcaggcagccggcgggccggcctccagcgcaggtgcccgagaggcaggggctggcctgggatgcgcgcgcacctgccctcgccccgccccgcccgcacgaggggtggtggccgaggccccgccccgcacgcctcgcctgaggcgggtccgctcagcccaggcgcccgcccccgcccccgccgattaaatgggccggcggggctcagcccccggaaacggtcgtacacttcggggctgcgagcgcggagggcgacgacgacgaagcgcagacagcgtcatggcagagcaggtggccctgagccggacccaggtgtgcgggatcctgcgggaagagcttttccagggcgatgccttccatcagtcggatacacacatattcatcatcatgggtgcatcgggtgacctggccaagaagaagatctaccccaccatctggtggctgttccgggatggccttctgcccgaaaacaccttcatcgtgggctatgcccgttcccgcctcacagtggctgacatccgcaaacagagtgagcccttcttcaaggccaccccagaggagaagctcaagctggaggacttctttgcccgcaactcctatgtggctggccagtacgatgatgcagcctcctaccagcgcctcaacagccacatgaatgccctccacctggggtcacaggccaaccgcctcttctacctggccttgcccccgaccgtctacgaggccgtcaccaagaacattcacgagtcctgcatgagccagataggctggaaccgcatcatcgtggagaagcccttcgggagggacctgcagagctctgaccggctgtccaaccacatctcctccctgttccgtgaggaccagatctaccgcatcgaccactacctgggcaaggagatggtgcagaacctcatggtgctgagatttgccaacaggatcttcggccccatctggaaccgggacaacatcgcctgcgttatcctcaccttcaaggagccctttggcactgagggtcgcgggggctatttcgatgaatttgggatcatccgggacgtgatgcagaaccacctactgcagatgctgtgtctggtggccatggagaagcccgcctccaccaactcagatgacgtccgtgatgagaaggtcaaggtgttgaaatgcatctcagaggtgcaggccaacaatgtggtcctgggccagtacgtggggaaccccgatggagagggcgaggccaccaaagggtacctggacgaccccacggtgccccgcgggtccaccaccgccacttttgcagccgtcgtcctctatgtggagaatgagaggtgggatggggtgcccttcatcctgcgctgcggcaaggccctgaacgagcgcaaggccgaggtgaggctgcagttccatgatgtggccggcgacatcttccaccagcagtgcaagcgcaacgagctggtgatccgcgtgcagcccaacgaggccgtgtacaccaagatgatgaccaagaagccgggcatgttcttcaaccccgaggagtcggagctggacctgacctacggcaacagatacaagaacgtgaagctccctgacgcctacgagcgcctcatcctggacgtcttctgcgggagccagatgcacttcgtgcgcagcgacgagctccgtgaggcctggcgtattttcaccccactgctgcaccagattgagctggagaagcccaagcccatcccctatatttatggcagccgaggccccacggaggcagacgagctgatgaagagagtgggtttccagtatgagggcacctacaagtgggtgaacccccacaagctctgagccctgggcacccacctccacccccgccacggccaccctccttcccgccgcccgaccccgagtcgggaggactccgggaccattgacctcagctgcacattcctggccccgggctctggccaccctggcccgcccctcgctgctgctactacccgagcccagctacattcctcagctgccaagcactcgagaccatcctggcccctccagaccctgcctgagcccaggagctgagtcacctcctccactcactccagcccaacagaaggaaggaggagggcgcccattcgtctgtcccagagcttattggccactgggtctcactcctgagtggggccagggtgggagggagggacaagggggaggaaaggggcgagcacccacgtgagagaatctgcctgtggccttgcccgccagcctcagtgccacttgacattccttgtcaccagcaacatctcgagccccctggatgtcccctgtcccaccaactctgcactccatggccaccccgtgccacccgtaggcagcctctctgctataagaaaagcagacgcagcagctgggacccctcccaacctcaatgccctgccattaaatccgcaaacagccc

SEQ ID NO: 15 - DNA, 2616 bp, Mouse
gaaagctaggccatacataatggctgggtgacacaggagacggggacccaggagaactgtgtggagctgcacttatgacaagactttgcgatctcgaaattgtaggggcagcggcatcggggaaggccaaagggcggggctggccagggatgcgcgcgcatctcctcctgcaatgatagactagcccgaagctcctcccctcctgcctctcctgaggcgggtcagctcagtcaaagcacacgccctcttgcgttaaatgggccagcgaagcttagcccccggaaactggctgtgcgctacagatctgtgaacgtgtttggcagcggcaactaaactcagaaaacatcatggcagagcaggtggccctgagccggacccaggtgtgtgggatcctgagggaagagttgtaccagggtgatgccttccaccaagctgatacacacatatttatcatcatgggtgcatcgggtgacctggccaagaagaagatctatcctaccatctggtggctgttccgggatggccttctacctgaagataccttcattgtgggctatgcccgctcacgactcacagtggacgacatccgaaagcagagtgagcccttctttaaagccactccagaagaaagacctaagctggaggagttctttgcccgtaattcctatgtagctggccagtatgatgatgcagcctcctataagcacctcaacagccacatgaatgccctgcaccaggggatgcaggccaaccgtctattctacctggccttgccccccacagtctatgaagcagtcaccaagaacattcaagagacctgcatgagtcagacaggctggaaccgcatcatcgtggagaagcccttcgggagagacctacagagctccaatcaactgtcgaaccacatctcctctcttttccgtgaggaccagatctaccgcattgaccactacctgggcaaagagatggtccagaatctcatggtgctgaggtttgccaacaggatctttggccccatctggaatcgagacaacattgcttgtgtgatcctcacatttaaagagccctttggtactgagggtcgtgggggctattttgatgaatttgggatcatcagggatgttatgcagaaccacctcctgcagatgttgtgtctggtggccatggaaaagcctgccactacaggttcagatgatgtccgtgatgagaaggtcaaagtgttgaagtgtatctcagaggtggaaactgacaacgtggtccttggccaatatgtggggaaccccaatggagaaggagaagctgccaatggatacttagatgaccccacagtaccccatgggtccaccactgccacttttgcagcagctgtcctctatgtggagaatgaacggtgggacggggtacccttcatcctgcgctgtggcaaagccctgaatgaacgcaaagctgaagtgagactgcagttccgagacgtggcaggtgacatcttccaccaacagtgcaagcgtaatgagctggtcatccgtgtgcagcccaatgaggcagtatacaccaagatgatgaccaagaagcctggcatgttctttaaccctgaggagtcggagctggatctaacttatggcaacagatacaagaatgtgaagctccctgatgcctatgaacgcctcatcctggatgtcttctgtgggagccagatgcactttgtccggagtgatgaactcagggaagcctggcgtatcttcacaccactgctgcacaagattgatcgagaaaagccccagcccatcccctatgtatatggcagccgcggccccacagaggcagatgagctgatgaagagagtgggcttccagtacgagggtacctacaagtgggtgaaccctcacaagctctgagccctggaagttacaccatctatactctgcctcttctggccaccctttctgcatcttcccttttcaccatctaaccctatattaggactattgaccccatattggaaggactttgggaccataggccttagatacacattctagttcctgggcttggaccgccattttgtcctatgctgctgccactgccaccaccagtaaacccagctacattcctcaaataccaggcatttaaaactcattgtagggtttcagggccaccactggccctatctgagccacccatctttccacaagacctgaatcacctcccttccagccgctgcagaaagaatgcctatcagtctgcccctggactccttaaggagttaggaacaatggggaggagccttaggcctcaaagggacaatgaccaaaccagacttcccagaggctatgggcaagctcctcaaaacttgaaggaagtggtcaaggacacctatgtgagaggacctgcccatggccacactagcctcagtgctactagacattcctcctcaccagatggaagagacctcatgctgcctagcaatattttgggggctctagatgtcccctgaccaattccatactccatggtcaacctcatcccacctatgggcagcctccttaccaaaggaaggcaagcacagcagctagaattttcctatcccaaccctgccattaaatcctcaaaacagtt

SEQ ID NO: 16 - DNA, 4421 bp, Human
gatcacttgaggttaggagtttgagaccagcctggccaacatgtcaaaaccctgtctctactaaaaatataaaaattagctgggcatggtggtgagtgcctataatttcagctatttgggaggctgaggcaggagaatcgcttgaacccaggaggcggaggtggcagtgagccgagattgtgccactgcaccccagcctgggcgactagagcaagaccctatctaaaaaaaacaaaaaacaaacaacaaacaaacaaagaatctttgttaaatatctaagtctatatatttatgggtgtctatatctgaagagggaaagcccagttatgaggctgttccagtcaggtgagagataactgggcatatgatctagggtagacagagaaatgggaaaagatttgggaaataatatataaaactataaactctatgtgtgtgtgtattgttacacaacatgtgaacagtagtcatctctaagattcttctatgaattcattcaataaacgtttattgcatgtctgccatgcgtcaggcaccattttaggcactgcaaacttgaagggatgacagacacagaccctgctgtcttttagcttatcatctattgaggagagggagaacatagcgaaaataaataggaatcaactagggccaagtgatagtgacttggggaactatttgagataaactggtcaaggaaagcctgatgaggtagaaggtggggacttgactctggaggtgggggctaagactcgggaccagactctagattagagttccagatttaacacctagaagtcactgcccctttccatggcaatgactcaacaacccgttaccaacctttttctagaaatttctgtataatctgccccttaatttgcatgttaactaaaagtgggtagaaatatgagtgcagagctgcctctgagctgctactctgggcacacggccttatggggtagccctgctctgcaaagaccagtgcctctgctcctgatgtacactgccacttcaatataagctgctgtctaatgccacctgcttgcccttgaattttttttttttttttgaaatggagtctctttctgttgcccaggctggagtcagtggcgcgatctcggctcactgcagctccgcctcccgggttcacgccattctcctgcctcagcctcccgagtagctgggactacaggagcccgccaccacgcctaatttttttgtattttttttttttttgtagagatggggtttcaccgtgttagctaggatggtctcgatctcctgacctcgtgatccgtccacctcagcctcccaaagtgctgggattacaggtgtgagccaccgcgcccggcatcccttgaattctttactgggtgaagccaagaatcttcccaggctaagtccaaattttggggcctgcctgccctgcatcatgaggaggtatctgagtggaacgtcaatgaggaggaagaatgagttggagacagccctggagaagaatattctagatagaaggaaaaggaagagcaaagacccttgggtgagaaagagtttgtatttttgaggaaagcatgctagtgtgaatgccaagcagtattctgtgggaagatctcaggaggtgtctaagggcatggagataagtggtcagatgcacggtctgttttataggtggaattaactgcttgctgatggattgactggctgtgagggtgagtggcaagaaggaatcgaagatgagttagggtggtggcgatgccatttgctgagacaactgggaaagaaaaagatttgggaaaaaagttgagttcagctttggacatgttaagtgtgatatgctagtcacttcagtggagatgacaaatggcaagctggagaataagcctgaactccagggaggacctcctgtagatttactatggtgagtcatcagcatgcatatgatataacagtcatgggctagaagttagtttctcctcagggagtttgaaactgtaactagttcagagaagagggtggagggcagccccgataccccagcatttaccaatagagcaaacagggactcaggagcctggggagtgaggttagccggaaaccctcagagtggagcactggtgctcttactgagagaggaaggtgtgtccagatggaggatgtgattaactgtcctcaacatccctgagagaaggagtaagacaagggcagggaagagaagagaatgcaagatttggcaacatgtaggtcattatgatgactatgacaaaagcagtttgagctcaattctgtgtggagtatagggaaggagggttgaggacgtgcatttagaagggtacatagttctcaagaagttttgctgagcacatctgtaatcccagctatttgggacgctgaagtgggaggactgcttgagcccaggagttcaagaccagcctgggcaacatatcgagtccctgcttaaaaaaaaaaaaaaggaagttttgctgagaggctagatggattatgatttttgtttatttttcctgtttatccatatattatttttcaacaatgagtattgattacttatataataattttaaggctgtacacattgcagacagcaccccactgtttgaaaaactcctcctcagtagaacatggcagaccttcatcttccttccctgaaccttttccaaccttaggcttgccattctccaccagtgctaatgtcatgtctcttgaaatctgtattgaagtcagtatttcattcttgccagtttccactgtgtgtttaaatttggagtctggtgtctagcattagctggggttggggcttccactcctctcagcattggtaagcctcctcacccaccccatcccatgtccaagatcacccagttacacacttaccatctacccagttcattcacatcatcagtcccagagctgcagagatgctctttttctacctcctacttctctggctcttagagaggcagcatgggataatggggcaagcgaatagggccttaaagtagagggacaagggttctcttccctatctgccacttattagctatgtgacctcgtgtaagtctcttttctttttgagacagggtctccctctgtcacctaggctggagtacagtggtatgatcatagctcactgcagcctcgaactcctgggctcaagctatccttccaccttagccttctgagcagcagggactacaggcacatgccaccatgtccggctgatttatttatttttatttgggaagatgggggtctcactatgtcgcccaggctggtcatgaactcctggtctcaagcaaccctccaaccttggactcccaaagtgctgggattacaggtgtgagccctggccttgccacaatttcctcatctgtaaaacggggttagtgaaactcacatcctatcagtggttttgaggatgggccgactcttgtattgcctgctctagtacaatcagcagctaaggcggctcactttccggccgtgctacaataggtaagaactaggatgctttagacgtgtgactgggcagtgggagcccctcacatgatcccgagatgccagacagtgtctctccgcacagggcgtgtgctggtccagaggcccgtttttccagtcgccccacaccccgggtccgcgatcacgctccccccacccatagccgagcctgacgcggcggtggctcatgcgcctttccgtcccagcctttagccacggaccacacgtcccatctcaggcgccccgcccctcccccgccccccgcccccggcgcgcctccccaggctgccggctccggtgtctgagcggccgcgcccgcgagccgtgagcgatgattggctgcgccacggcggcgggcggtccgtgggcgcacacaccctccccgcgcagccaatgggcgtgcgcacgtcactgatccggagcccgcgggccggcagcccctcaataagccacattgttgcatgaaactccggcgcaggagtcccgggctgccgctggcaacatcgtgtcacccagctaagaaaatccgcgggcccgagccacgcgcctgtgaatcggagaggtcccactgcccgagtggagccgggctgagattcttctcaagttgagcctcagtgatcctgtggccgaagttagcgccttgacgtgggacaaccggacacgtcgccaggagagaactgaggcgccttctagcagttgtgacgccaaaatcacgtctccggagacccgcgccctccgccagccgggcgcaccctcgccggtagccttctttgtgcgccgtccggactcccagctcccggcccggcagccgagccccagcacaaagcagtcggaccgcgccgcccgcctcccctctcgcgtctccgcctcggtttcccaactctgcgccgtcgggccgcggcagg

SEQ ID NO: 17 - DNA, 629 bp, Human
cccgagtcgcggggctgccgcttggacgtcgtcctgtctgggtgtcgcgggccggccccgcggggagcgcccccggcgcgatgcccttcaggaaagcctgtgggccaaagctgaccaactcccccaccgtcatcgtcatggtgggcctccccgcccggggcaagacctacatctccaagaagctgactcgctacctcaactggattggcgtccccacaaaagtgttcaacgtcggggagtatcgccgggaggctgtgaagcagtacagctcctacaacttcttccgccccgacaatgaggaagccatgaaagtccggaagcaatgtgccttagctgccttgagagatgtcaaaagctacctggcgaaagaagggggacaaattgcggttttcgatgccaccaatactactagagagaggagacacatgatccttcattttgccaaagaaaatgactttaaggcgtttttcatcgagtcggtgtgcgacgaccctacagttgtggcctccaatatcatggtaagacagccgggagccccgtgcttctgcggcagcgtagaccacaagggcatttgcagtctgaggaagtgggggaccgggtccggctcggaagcgcagctgagcccttag

SEQ ID NO: 18 - DNA, 2078 bp, Human
gcaacgcaaagcgcttggtattgagtctgtggccgacttcggttccggtctctgcagcagccgtgatcgcttagtggagtgcttagggtagttggccaggatgccgaatatcaaaatcttcagcggcagctcccaccaggacttatctcagaaaattgctgaccgcctgggcctggagctaggcaaggtggtgactaagaaattcagcaaccaggagacctgtgtggaaattggtgaaagtgtacgtggagaggatgtctacattgttcagagtggttgtggcgaaatcaatgacaatttaatggagcttttgatcatgattaatgcctgcaagattgcttcagccagccgggttactgcagtcatcccatgcttcccttatgcccggcaggataagaaagataagagccgggcgccaatctcagccaagcttgttgcaaatatgctatctgtagcaggtgcagatcatattatcaccatggacctacatgcttctcaaattcagggcttttttgatatcccagtagacaatttgtatgcagagccggctgtcctaaagtggataagggagaatatctctgagtggaggaactgcactattgtctcacctgatgctggtggagctaagagagtgacctccattgcagacaggctgaatgtggactttgccttgattcacaaagaacggaagaaggccaatgaagtggaccgcatggtgcttgtgggagatgtgaaggatcgggtggccatccttgtggatgacatggctgacacttgtggcacaatctgccatgcagctgacaaacttctctcagctggcgccaccagagtttatgccatcttgactcatggaatcttctccggtcctgctatttctcgcatcaacaacgcatgctttgaggcagtagtagtcaccaataccatacctcaggaggacaagatgaagcattgctccaaaatacaggtgattgacatctctatgatccttgcagaagccatcaggagaactcacaatggagaatccgtttcttacctattcagccatgtccctttataatagagtaacttctgaggctttttgagaataaaatccaccccacccttgtttccccttggtatttgatgacaaattcagcagaagacccggcttgctccagtgtagctttctacatcccacatcaggtatattagagcttatccgaactggggaaagacggattgagattaactgctgggacctcctacctgcattatctcattctggcttccttgataattctgtgggccttgcagctttaactatagctcagctgctgcaagatttcagacttttgaggatgttgtgtgagggtgtttgactgtgactggggaagctcagactactttgtatgtgaatgcttcagggttttctttgttgagaacaactagcaacaaaggcaacccatgtgtgaccagttctccccaaggtctatgctaaattatagcaagagccctgggcaaccccaaacctagtcctggtagctgagcaccctgtaaggcaggagcaggcagctcagcttgagcagacattgggtggggggtggggggtggttgaggggggaggcagcacagtgcagcaaatgtttcttgggaggaagaagcctgatccatcaccatctgcttgactatgtagcttggattctcctttgtacctatccctttcgatttggctttaccttcatctatcttgatcctttcctggccaaatatcctcttgggcccaaatgaacattgtaccatagtcttctggaaagcaaacatgcttcctgctatgtaattgctaacattcatattagatgatgtgctgtagcttgatcttccttagcctactgccactgaggcagtaggttttaggtggtatcgtagtgccttttgattaatttaagtatttaattttcatcttccttctttggatctatttggcctctcaaatgaactgagattcctgttaaaaaagattgatgttattgtctcttgtagaggaaactaataaagtgtgtgtacctgtgtgaaaaaaaaaaaaaaaaaaaaaaaaaaaa

SEQ ID NO: 19 - DNA, 3756 bp, Human
gactcggagggggaggagcagggctgagctggccacgccacctagggacagcgcgcgccgccgcagtagctggggccaccctcgggaaggaagagcctgtcgcgagcgcgagcttctgagctcgacgggccgagctggcagctggttggtgcttacaccttggccgcagcggcaggtccttccacgtgctttcggcggcgacatggagctggaggagttggggatccgagaggaatgtggcgtgttcgggtgcatcgcctcaggagagtggcccacgcagctggatgtaccgcatgtgatcactctgggactcgtggggctgcagcaccggggtcaggagagtgctggtattgtgactagtgatgggagttcggtgccaacattcaaatcacacaagggaatgggtcttgtaaatcacgtctttactgaagacaatttgaaaaaattatatgtttcaaatcttggaattggacacaccaggtatgccaccacaggaaaatgtgaactagaaaattgtcagcccttcgttgttgaaacacttcatgggaagatagctgtggcacataatggcgaattggtaaatgctgctcgattaaggaaaaagcttctgcgtcatggtattggtctgtctacaagttctgatagtgaaatgattacccagttactggcgtatacccctcctcaggaacaagatgacaccccagactgggtagccaggattaaaaacttgatgaaggaagcacccacagcatactccctgcttataatgcacagagatgttatttatgcagtacgagatccttatggaaatcgtcccttatgcattggtcgtcttattccagtgtctgatataaatgacaaagagaaaaaaacatcagaaacagaaggatgggtggtgtcttcagaatcttgtagcttcttatctattggtgcaagatattaccgtgaagtcttgcctggagaaattgtggaaatatccagacacaatgtccaaactcttgatattatatcaaggtctgaaggaaacccagtggctttttgtatctttgaatatgtttattttgcaagaccagacagtatgttcgaagaccaaatggtttatacagtaagataccgttgtggccagcagctagcgattgaagcacctgtggatgcagatttggttagcactgttccagaatctgctacgcctgctgctcttgcttacgcaggaaagtgtggacttccatatgtggaggtgctgtgtaaaaaccggtatgtagggagaaccttcattcagccaaacatgaggttaagacaacttggtgttgcaaaaaaatttggagtattgtcagacaactttaaaggcaaaagaattgttcttgtagatgattcaattgtcagaggcaataccatctcacctataataaaactgctcaaagaatctggtgcaaaagaggtacacattcgagtagcttcaccaccaattaaatatccatgcttcatgggaataaacattcctacaaaagaagagctcattgccaataaaccagaatttgatcaccttgcagaatatctaggagcaaacagtgttgtgtatctgtcagtagaaggactggtttcatctgtacaagaagggataaagtttaaaaaacagaaagagaaaaagcacgatattatgatccaagaaaatggaaatggtctggaatgttttgaaaagagtggtcattgtacagcttgtctcactggaaaatatcctgtagaattagaatggtagctggtagggttggatgtgtgtagtttcaagatagaaagttggtcaagaagttatagtggtcacacctcatctatttactgttactcagttggtacaatgtaaaatgccatgcttatgtttataagttttgagattttttttttttctgaaaaggataccaaagtgcgataactgaacatttccaattgcatataatacaacaatatgtggtgttcttttttttacacaagcattggctagcctttttaacctggtcagagaaggcaggtggtcactgacatttcccaagtccatgctttaaagggtttgcaagaagttagggttaaggagaggtgatgccaacaagacaggtgagttaaatataccatttcacacaaagtttgaatagaatacattatacctcataggtgtctagcctctacagttctggctgtagttatgaccttggcttccctgtctaactgtagacaaatctttaaaaaaaaataataataatctggtgcctcagtttccccacatgtgcaatgggatacttattaaataattaataagaatgtgaataagtgtcatacttttgtgatttgagccatcatttcacttctgattttaagacaactcatgattgttagctttcagaaagctaatgattgttaactttttgaaattagtttacaattaattaagatttcattatgatggaaggagacataattggcagatctttgccatctctctttgagatgtcctaaaaagggttgtaaaaatctgtgaaaaagtttttcctacatttgactagaaaatgtgatccatagtatttagtgccctgatactataagctcagcaagtaacctggtacatttgaaataaaaaccaaatttttagattcaaacaatccctttatccttaatttaattaattatcatatgctttttttaatgaagtgcttgatcacttgcaaacatatatacatgtagatgtacatatacatgtacacatacacataaatattattgcaattaagtgatcaagtacagacacaataggggccagttttgtttaaggatcaaagagacaaccactttggggaattagtatcaacttacaatccaagtccaagtatcatcttataatcacttttttctactatattaagatctaatgaatttgatttcttttttgaagttttttcttgtaacatctgagattagaagtttaagatgacttgaccccaaacctttgtttatgtaagaatttttaaacataaaagtgtttgtttctgttatgttaccataatttgatgtatatagtgtccagatccatttagaaatttaatatttattaataactgaaactgtttgtcttcctttggtatatagtctcgcatattatattatagcaggccaagataaaattttgacagctctttaagcccacatgcagcagtgggtcagataaccctgtggcagtgacacgggcaaattggcatttgaataaagccctgggaccacctcaacatgcgtagcctcttgtcttaaatgtactccccatggcagcatggaggaggcaagacctgtgggtcaattttgaactggccttactttgatttttaaaacaagagactcagggaaagtactaaaccaaaatctctgattttactttgcgttttctgtagtttttgttttactgagatgcttttgtaaaggaaaataatactgtgacagtttagtaattctacagattcttaatatttctccatcatggccttttacttcacaattttctgaagtctgaattcaattacaatttttttttaccaatttaatctcaaatgttgtttaactgctttaaattcatatacgtagagtattataaactgcagagatgaaaaatgtgttttcacgggatttatattgtgaactaaactaagcctactttttgtgacttatttgtgatgccttgttgataaatatgtgtaataagtatgtttaaaaaaaaaaaaa

SEQ ID NO: 20 - DNA, 5761 bp, Human
gtcagccttaaacactgactgcacccctcccagatttcttttacattaactaaaaagtcttatcacacaatctcataaaatttatgtaatttcatttaattttagccacaaatcatcttcaaaatgacgaggattttgacagctttcaaagtggtgaggacactgaagactggttttggctttaccaatgtgactgcacaccaaaaatggaaattttcaagacctggcatcaggctcctttctgtcaaggcacagacagcacacattgtcctggaagatggaactaagatgaaaggttactcctttggccatccatcctctgttgctggtgaagtggtttttaatactggcctgggagggtacccagaagctattactgaccctgcctacaaaggacagattctcacaatggccaaccctattattgggaatggtggagctcctgatactactgctctggatgaactgggacttagcaaatatttggagtctaatggaatcaaggtttcaggtttgctggtgctggattatagtaaagactacaaccactggctggctaccaagagtttagggcaatggctacaggaagaaaaggttcctgcaatttatggagtggacacaagaatgctgactaaaataattcgggataagggtaccatgcttgggaagattgaatttgaaggtcagcctgtggattttgtggatccaaataaacagaatttgattgctgaggtttcaaccaaggatgtcaaagtgtacggcaaaggaaaccccacaaaagtggtagctgtagactgtgggattaaaaacaatgtaatccgcctgctagtaaagcgaggagctgaagtgcacttagttccctggaaccatgatttcaccaagatggagtatgatgggattttgatcgcgggaggaccggggaacccagctcttgcagaaccactaattcagaatgtcagaaagattttggagagtgatcgcaaggagccattgtttggaatcagtacaggaaacttaataacaggattggctgctggtgccaaaacctacaagatgtccatggccaacagagggcagaatcagcctgttttgaatatcacaaacaaacaggctttcattactgctcagaatcatggctatgccttggacaacaccctccctgctggctggaaaccactttttgtgaatgtcaacgatcaaacaaatgaggggattatgcatgagagcaaacccttcttcgctgtgcagttccacccagaggtcaccccggggccaatagacactgagtacctgtttgattcctttttctcactgataaagaaaggaaaagctaccaccattacatcagtcttaccgaagccagcactagttgcatctcgggttgaggtttccaaagtccttattctaggatcaggaggtctgtccattggtcaggctggagaatttgattactcaggatctcaagctgtaaaagccatgaaggaagaaaatgtcaaaactgttctgatgaacccaaacattgcatcagtccagaccaatgaggtgggcttaaagcaagcggatactgtctactttcttcccatcacccctcagtttgtcacagaggtcatcaaggcagaacagccagatgggttaattctgggcatgggtggccagacagctctgaactgtggagtggaactattcaagagaggtgtgctcaaggaatatggtgtgaaagtcctgggaacttcagttgagtccattatggctacggaagacaggcagctgttttcagataaactaaatgagatcaatgaaaagattgctccaagttttgcagtggaatcgattgaggatgcactgaaggcagcagacaccattggctacccagtgatgatccgttccgcctatgcactgggtgggttaggctcaggcatctgtcccaacagagagactttgatggacctcagcacaaaggcctttgctatgaccaaccaaattctggtggagaagtcagtgacaggttggaaagaaatagaatatgaagtggttcgagatgctgatgacaattgtgtcactgtctgtaacatggaaaatgttgatgccatgggtgttcacacaggtgactcagttgttgtggctcctgcccagacactctccaatgccgagtttcagatgttgagacgtacttcaatcaatgttgttcgccacttgggcattgtgggtgaatgcaacattcagtttgcccttcatcctacctcaatggaatactgcatcattgaagtgaatgccagactgtcccgaagctctgctctggcctcaaaagccactggctacccattggcattcattgctgcaaagattgccctaggaatcccacttccagaaattaagaacgtcgtatccgggaagacatcagcctgttttgaacctagcctggattacatggtcaccaagattccccgctgggatcttgaccgttttcatggaacatctagccgaattggtagctctatgaaaagtgtaggagaggtcatggctattggtcgtacctttgaggagagtttccagaaagctttacggatgtgccacccatctatagaaggtttcactccccgtctcccaatgaacaaagaatggccatctaatttagatcttagaaaagagttgtctgaaccaagcagcacgcgtatctatgccattgccaaggccattgatgacaacatgtcccttgatgagattgagaagctcacatacattgacaagtggtttttgtataagatgcgtgatattttaaacatggaaaagacactgaaagggctcaacagtgagtccatgacagaagaaaccctgaaaagggcaaaggagattgggttctcagataagcagatttcaaaatgccttgggctcactgaggcccagacaagggagctgaggttaaagaaaaacatccacccttgggttaaacagattgatacactggctgcagaatacccatcagtaacaaactatctctatgttacctacaatggtcaggagcatgatgtcaattttgatgaccatggaatgatggtgctaggctgtggtccatatcacattggcagcagtgtggaatttgattggtgtgctgtctctagtatccgcacactgcgtcaacttggcaagaagacggtggtggtgaattgcaatcctgagactgtgagcacagactttgatgagtgtgacaaactgtactttgaagagttgtccttggagagaatcctagacatctaccatcaggaggcatgtggtggctgcatcatatcagttggaggccagattccaaacaacctggcagttcctctatacaagaatggtgtcaagatcatgggcacaagccccctgcagatcgacagggctgaggatcgctccatcttctcagctgtcttggatgagctgaaggtggctcaggcaccttggaaagctgttaatactttgaatgaagcactggaatttgcaaagtctgtggactacccctgcttgttgaggccttcctatgttttgagtgggtctgctatgaatgtggtattctctgaggatgagatgaaaaaattcctagaagaggcgactagagtttctcaggagcacccagtggtcctgacaaaatttgttgaaggggcccgagaagtagaaatggacgctgttggcaaagatggaagggttatctctcatgccatctctgaacatgttgaagatgcaggtgtccactcgggagatgccactctgatgctgcccacacaaaccatcagccaaggggccattgaaaaggtgaaggatgctacccggaagattgcaaaggcttttgccatctctggtccattcaacgtccaatttcttgtcaaaggaaatgatgtcttggtgattgagtgtaacttgagagcttctcgatccttcccctttgtttccaagactcttggggttgacttcattgatgtggccaccaaggtgatgattggagagaatgttgatgagaaacatcttccaacattggaccatcccataattcctgctgactatgttgcaattaaggctcccatgttttcctggccccggttgagggatgctgaccccattctgagatgtgagatggcttccactggagaggtggcttgctttggtgaaggtattcatacagccttcctaaaggcaatgctttccacaggatttaagataccccagaaaggcatcctgataggcatccagcaatcattccggccaagattccttggtgtggctgaacaattacacaatgaaggtttcaagctgtttgccacggaagccacatcagactggctcaacgccaacaatgtccctgccaccccagtggcatggccgtctcaagaaggacagaatcccagcctctcttccatcagaaaattgattagagatggcagcattgacctagtgattaaccttcccaacaacaacactaaatttgtccatgataattatgtgattcggaggacagctgttgatagtggaatccctctcctcactaattttcaggtgaccaaactttttgctgaagctgtgcagaaatctcgcaaggtggactccaagagtcttttccactacaggcagtacagtgctggaaaagcagcatagagatgcagacaccccagccccattattaaatcaacctgagccacatgttatctaaaggaactgattcacaactttctcagagatgaatattgataactaaacttcatttcagtttactttgttatgccttaatattctgtgtcttttgcaattaaattgtcagtcacttcttcaaaaccttacagtccttcctaagttactcttcatgagatttcatccatttactaatactgtatttttggtggactaggcttgcctatgtgcttatgtgtagctttttactttttatggtgctgattaatggtgatcaaggtaggaaaagttgctgttctattttctgaactctttctatactttaagatactctatttttaaaacactatctgcaaactcaggacactttaacagggcagaatactctaaaaacttgataaaatgaaatatagatttaatttatgaaccttccatcatgatgtttgtgtattgcttctttttggatcctcattctcacccatttggctaatccaggaatattgttatcccttcccattatattgaagttgagaaatgtgacagaggcatttagagtatggacttttcttttctttttctttttctttttttctttttgagatggagtcacactctccaggctggagtgcagtggcacaatctcggctcactgcaatttgcgtctcccaagttcaagcgattctcctgctttagactatggatttctttaaggaatactggtttgcagttttgttttctggactatatcagcagatggtagacagtgtttatgtagatgtgttgttgtttttatcattggattttaacttggcccgagtgaaataatcagatttttgtcattcacactctcccccagttttggaataacttggaagtaaggttcattcccttaagacgatggattctgttgaactatggggtcccacactgcactattaattccacccactgtaagggcaaggacaccattccttctacatataagaaaaaagtctctccccaagggcagcctttgttacttttaaatattttctgttattacaagtgctctaattgtgaacttttaaataaaatactattaagaggtaaaaaaaaaaaaaaa

SEQ ID NO: 21 - DNA, 7108 bp, Human
gcgcgcccgaggctcctacgctgccgcgcccggcttctctccagcgccccgcgccgttagccacgtggaccgactccggcgcgccgtcctcacgtggttccagtggagtttgcagtccttcccgcttctccgtactcgcccccgcctctgagctcccttcccatggcggccctagtgttggaggacgggtcggtcctgcggggccagccctttggggccgccgtgtcgactgccggggaagtggtgtttcaaaccggcatggtcggctaccccgaggccctcaccgatccctcctacaaggcacagatcttagtgctcacctatcctctgatcggcaactatggcatccccccagatgaaatggatgagttcggtctctgcaagtggtttgaatcctcgggcatccacgtagcagcactggtagtgggagagtgctgtcctactcccagccactggagtgccacccgcaccctgcatgagtggctgcagcagcatggcatccctggcttgcaaggagtagacactcgggagctgaccaagaagttgcgggaacaggggtctctgctggggaagctggtccagaatggaacagaaccttcatccctgccattcttggaccccaatgcccgccccctggtaccagaggtctccattaagactccacgggtattcaatacagggggtgcccctcggatccttgctttggactgtggcctcaagtataatcagatccgatgcctctgccagcgtggggctgaggtcactgtggtaccctgggaccatgcactagacagccaagagtatgagggtctcttcttaagtaatgggcctggtgaccctgcctcctatcccagtgtcgtatccacactgagccgtgttttatctgagcctaatccccgacctgtctttgggatctgcctgggacaccagctattggccttagccattggggccaagacttacaagatgagatatgggaaccgaggccataaccagccctgcttgttggtgggctctgggcgctgctttctgacatcccagaaccatgggtttgctgtggagacagactcactgccagcagactgggctcctctcttcaccaacgccaatgatggttccaatgaaggcattgtgcacaacagcttgcctttcttcagtgtccagtttcacccagagcaccaagctggcccttcagatatggaactgcttttcgatatctttctggaaactgtgaaagaggccacagctgggaaccctgggggccagacagttagagagcggctgactgagcgcctctgtccccctgggattcccactcccggctctggacttccaccaccacgaaaggttctgatcctgggctcagggggcctctccattggccaagctggagaatttgactactcgggctctcaggcaattaaggccctgaaggaggaaaacatccagacgttgctgatcaaccccaatattgccacagtgcagacctcccaggggctggccgacaaggtctattttcttcccataacacctcattatgtaacccaggtgatacgtaatgaacgccccgatggtgtgttactgacttttgggggccagactgctctgaactgtggtgtggagctgaccaaggccggggtgctggctcggtatggggtccgggtcctgggcacaccagtggagaccattgagctgaccgaggatcgacgggcctttgctgccagaatggcagagatcggagagcatgtggccccgagcgaggcagcaaattctcttgaacaggcccaggcagccgctgaacggctggggtaccctgtgctagtgcgtgcagcctttgccctgggtggcctgggctctggctttgcctctaacagggaggagctctctgctctcgtggccccagcttttgcccataccagccaagtgctagtagacaagtctctgaagggatggaaggagattgagtacgaggtggtgagagacgcctatggcaactgtgtcacggtgtgtaacatggagaacttggacccactgggcatccacactggtgagtccatagtggtggcccctagccagacactgaatgacagggagtatcagctcctgaggcagacagctatcaaggtgacccagcacctgggaattgttggggagtgcaatgtgcagtatgccttgaaccctgagtctgagcagtattacatcattgaagtgaatgccaggctctctcgcagctctgccctggccagtaaggccacaggttatccactggcttatgtggcagccaagctagcattgggcatccctttgcctgagctcaggaactctgtgacagggggtacagcagcctttgaacccagcgtggattattgtgtggtgaagattcctcgatgggaccttagcaagttcctgcgagtcagcacaaagattgggagctgcatgaagagcgttggtgaagtcatgggcattgggcgttcatttgaggaggccttccagaaggccctgcgcatggtggatgagaactgtgtgggctttgatcacacagtgaaaccagtcagcgatatggagttggagactccaacagataagcggatttttgtggtggcagctgctttgtgggctggttattcagtggaccgcctgtatgagctcacacgcatcgaccgctggttcctgcaccgaatgaagcgtatcatcgcacatgcccagctgctagaacaacaccgtggacagcctttgccgccagacctgctgcaacaggccaagtgtcttggcttctcagacaaacagattgcccttgcagttctgagcacagagctggctgttcgcaagctgcgtcaggaactggggatctgtccagcagtgaaacagattgacacagttgcagctgagtggccagcccagacaaattacctatacctaacgtattggggcaccacccatgacctcacctttcgaacacctcatgtcctagtccttggctctggcgtctaccgtattggctctagcgttgaatttgactggtgtgctgtaggctgcatccagcagctccgaaagatgggatataagaccatcatggtgaactataacccagagacagtcagcaccgactatgacatgtgtgatcgactctactttgatgagatctcttttgaggtggtgatggacatctatgagctcgagaaccctgaaggtgtgatcctatccatgggtggacagctgcccaacaacatggccatggcgttgcatcggcagcagtgccgggtgctgggcacctcccctgaagccattgactcggctgagaaccgtttcaagttttcccggctccttgacaccattggtatcagccagcctcagtggagggagctcagtgacctcgagtctgctcgccaattctgccagaccgtggggtacccctgtgtggtgcgcccctcctatgtgctgagcggtgctgctatgaatgtggcctacacggatggagacctggagcgcttcctgagcagcgcagcagccgtctccaaagagcatcccgtggtcatctccaagttcatccaggaggctaaggagattgacgtggatgccgtggcctctgatggtgtggtggcagccatcgccatctctgagcatgtggagaatgcaggtgtgcattcaggtgatgcgacgctggtgacccccccacaagatatcactgccaaaaccctggagcggatcaaagccattgtgcatgctgtgggccaggagctacaggtcacaggacccttcaatctgcagctcattgccaaggatgaccagctgaaagttattgaatgcaacgtacgtgtctctcgctccttccccttcgtttccaagacactgggtgtggacctagtagccttggccacgcgggtcatcatgggggaagaagtggaacctgtggggctaatgactggttctggagtcgtgggagtaaaggtgcctcagttctccttctcccgcttggcgggtgctgacgtggtgttgggtgtggaaatgaccagtactggggaggtggccggctttggggagagccgctgtgaggcatacctcaaggccatgctaagcactggctttaagatccccaagaagaatatcctgctgaccattggcagctataagaacaaaagcgagctgctcccaactgtgcggctactggagagcctgggctacagcctctatgccagtctcggcacagctgacttctacactgagcatggcgtcaaggtaacagctgtggactggcactttgaggaggctgtggatggtgagtgcccaccacagcggagcatcctggagcagctagctgagaaaaactttgagctggtgattaacctgtcaatgcgtggagctgggggccggcgtctctcttcctttgtcaccaagggctaccgcacccgacgcttggccgctgacttctccgtgcccctaatcatcgatatcaagtgcaccaaactctttgtggaggccctaggccagatcgggccagcccctcctttgaaggtgcatgttgactgtatgacctcccaaaagcttgtgcgactgccgggattgattgatgtccatgtgcacctgcgggaaccaggtgggacacataaggaggactttgcttcaggcacagccgctgccctggctgggggtatcaccatggtgtgtgccatgcctaatacccggccccccatcattgacgcccctgctctggccctggcccagaagctggcagaggctggcgcccggtgcgactttgcgctattccttggggcctcgtctgaaaatgcaggaaccttgggcaccgtggccgggtctgcagccgggctgaagctttacctcaatgagaccttctctgagctgcggctggacagcgtggtccagtggatggagcatttcgagacatggccctcccacctccccattgtggctcacgcagagcagcaaaccgtggctgctgtcctcatggtggctcagctcactcagcgctcagtgcacatatgtcacgtggcacggaaggaggagatcctgctaattaaagctgcaaaggcacggggcttgccagtgacctgcgaggtggctccccaccacctgttcctaagccatgatgacctggagcgcctggggcctgggaagggggaggtccggcctgagcttggctcccgccaggatgtggaagccctgtgggagaacatggctgtcatcgactgctttgcctcagaccatgctccccataccttggaggagaagtgtgggtccaggcccccacctgggttcccagggttagagaccatgctgccactactcctgacggctgtaagcgagggccggctcagcctggacgacctgctgcagcgattgcaccacaatcctcggcgcatctttcacctgcccccgcaggaggacacctatgtggaggtggatctggagcatgagtggacaattcccagccacatgcccttctccaaggcccactggacaccttttgaagggcagaaagtgaagggcaccgtccgccgtgtggtcctgcgaggggaggttgcctatatcgatgggcaggttctggtacccccgggctatggacaggatgtacggaagtggccacagggggctgttcctcagctcccaccctcagcccctgccactagtgagatgaccacgacacctgaaagaccccgccgtggcatcccagggcttcctgatggccgcttccatctgccgccccgaatccatcgagcctccgacccaggtttgccagctgaggagccaaaggagaagtcctctcggaaggtagccgagccagagctgatgggaacccctgatggcacctgctaccctccaccaccagtaccgagacaggcatctccccagaacctggggacccctggcttgctgcacccccagacctcacccctgctgcactcattagtgggccaacatatcctgtccgtccagcagttcaccaaggatcagatgtctcacctgttcaatgtggcacacacactgcgtatgatggtgcagaaggagcggagcctcgacatcctgaaggggaaggtcatggcctccatgttctatgaagtgagcacacggaccagcagctcctttgcagcagccatggcccggctgggaggtgctgtgctcagcttctcggaagccacatcgtccgtccagaagggcgaatccctggctgactccgtgcagaccatgagctgctatgccgacgtcgtcgtgctccggcacccccagcctggagcagtggagctggccgccaagcactgccggaggccagtgatcaatgctggggatggggtcggagagcaccccacccaggccctgctggacatcttcaccatccgtgaggagctgggaactgtcaatggcatgacgatcacgatggtgggtgacctgaagcacggacgcacagtacattccctggcctgcctgctcacccagtatcgtgtcagcctgcgctacgtggcacctcccagcctgcgcatgccacccactgtgcgggccttcgtggcctcccgcggcaccaagcaggaggaattcgagagcattgaggaggcgctgcctgacactgatgtgctctacatgactcgaatccagaaggaacgatttggctctacccaggagtacgaagcttgctttggtcagttcatcctcactccccacatcatgacccgggccaagaagaagatggtggtgatgcacccgatgccccgtgtcaacgagataagcgtggaagtggactcggatccccgcgcagcctacttccgccaggctgagaacggcatgtacatccgcatggctctgttagccaccgtgctgggccgtttctagggcctggcttcctcagcctcttctctttaggcccagctgctgggcaaggaattccagtgcctcctacgggggcagcacacttagatattcctggacatccagatagctcacatgtgctgaccacacttcaggctctggactggagctctctggcatgggggtggggcctcagatgctggggcccagtctgccccatcttcattcctgcaccttaaacctgtacagtcatttttctactgacttaataaacagccgagctgtcccttga

SEQ ID NO: 22 - DNA, 3103 bp, Human
attcgaaccccgtcgcgcccctttgtgcgtcacgggtggcgggcgcgggaaggggatttggattgttgcgcctctgctctgaagaaagtgctgtctggctccaactccagttctttcccctgagcagcgcctggaacctaacccttcccactctgtcaccttctcgatcccgccggcgctttagagccgcagtccagtcttggatccttcagagcctcagccactagctgcgatgcatgtgatcaagcgagatggccgccaagaacgagtcatgtttgacaaaattacatctcgaatccagaagctttgttatggactcaatatggattttgttgatcctgctcagatcaccatgaaagtaatccaaggcttgtacagtggggtcaccacagtggaactagatactttggctgctgaaacagctgcaaccttgactactaagcaccctgactatgctatcctggcagccaggatcgctgtctctaacttgcacaaagaaacaaagaaagtgttcagtgatgtgatggaagacctctataactacataaatccacataatggcaaacactctcccatggtggccaagtcaacattggatattgttctggccaataaagatcgcctgaattctgctattatctatgaccgagatttctcttacaattacttcggctttaagacgctagagcggtcttatttgttgaagatcaatggaaaagtggctgaaagaccacaacatatgttgatgagagtatctgttgggatccacaaagaagacattgatgcagcaattgaaacatataatcttctttctgagaggtggtttactcatgcttcgcccactctcttcaatgctggtaccaaccgcccacaactttctagctgttttcttctgagtatgaaagatgacagcattgaaggcatttatgacactctaaagcaatgtgcattgatttctaagtctgctggaggaattggtgttgctgtgagttgtattcgggctactggcagctacattgctgggactaatggcaattccaatggccttgtaccgatgctgagagtatataacaacacagctcgatatgtggatcaaggtgggaacaagcgtcctggggcatttgctatttacctggagccttggcatttagacatctttgaattccttgatttaaagaagaacacaggaaaggaagagcagcgtgccagagatcttttctttgctctttggattccggatctcttcatgaaacgagtggagactaatcaggactggtctttgatgtgtccaaatgagtgtcctggtctggatgaggtttggggagaggaatttgagaaactatatgcaagttatgagaaacaaggtcgtgtccgcaaagttgtaaaagctcagcagctttggtatgccatcattgagtctcagacggaaacaggcaccccgtatatgctctacaaagattcctgtaatcgaaagagcaaccagcagaacctgggaaccatcaaatgcagcaacctgtgcacagaaatagtggagtacaccagcaaagatgaggttgctgtttgtaatttggcttccctggccctgaatatgtatgtcacatcagaacacacatacgactttaagaagttggctgaagtcactaaagtcgttgtccgaaacttgaataaaattattgatataaactactatcctgtaccagaggcatgcctatcaaataaacgccatcgccccattggaattggggtacaaggtctggcagatgcttttatcctgatgagatacccttttgagagtgcagaagcccagttactgaataagcagatctttgaaactatttattatggtgctctggaagccagctgtgaccttgccaaggagcagggcccatacgaaacctatgagggctctccagttagcaaaggaattcttcagtatgatatgtggaatgttactcctacagacctatgggactggaaggttctcaaggagaagattgcaaagtatggtataagaaacagtttacttattgccccgatgcctacagcttccactgctcagatcctggggaataatgagtccattgaaccttacaccagcaacatctatactcgcagagtcttgtcaggagaatttcagattgtaaatcctcacttattgaaagatcttaccgagcggggcctatggcatgaagagatgaaaaaccagattattgcatgcaatggctctattcagagcataccagaaattcctgatgacctgaagcaactttataaaactgtgtgggaaatctctcagaaaactgttctcaagatggcagctgagagaggtgctttcattgatcaaagccaatctttgaacatccacattgctgagcctaactatggcaaactcactagtatgcacttctacggctggaagcagggtttgaagactgggatgtattatttaaggacaagaccagcggctaatccaatccagttcactctaaataaggagaagctaaaagataaagaaaaggtatcaaaagaggaagaagagaaggagaggaacacagcagccatggtgtgctctttggagaatagagatgaatgtctgatgtgtggatcctgaggaaagacttggaagagaccagcatgtcttcagtagccaaactacttcttgagcatagataggtatagtgggtttgcttgaggtggtaaggctttgctggaccctgttgcaggcaaaaggagtaattgatttaaagtactgttaatgatgataatgattttttttttaaactcatatattgggattttcaccaaaataatgcttttgaaaaaaagaaaaaaaaaacggatatattgagaatcaaagtagaagttttaggaatgcaaaataagtcatcttgcatacagggagtggttaagtaaggtttcatcacccctttagcactgcttttctgaagacttcagttttgttaaggagatttagttttactgctttgactggtgggtctctagaagcaaaactgagtgataactcatgagaagtactgataggacctttatctggatatggtcctataggttattctgaaataaagataaacatttctaagtg

SEQ ID NO: 23 - DNA, 1529 bp, Human
ccacttggcctgcctccgtcccgccgcgccacttggcctgcctccgtcccgccgcgccacttcgcctgcctccgtcccccgcccgccgcgccatgcctgtggccggctcggagctgccgcgccggcccttgccccccgccgcacaggagcgggacgccgagccgcgtccgccgcacggggagctgcagtacctggggcagatccaacacatcctccgctgcggcgtcaggaaggacgaccgcacgggcaccggcaccctgtcggtattcggcatgcaggcgcgctacagcctgagagatgaattccctctgctgacaaccaaacgtgtgttctggaagggtgttttggaggagttgctgtggtttatcaagggatccacaaatgctaaagagctgtcttccaagggagtgaaaatctgggatgccaatggatcccgagactttttggacagcctgggattctccaccagagaagaaggggacttgggcccagtttatggcttccagtggaggcattttggggcagaatacagagatatggaatcagattattcaggacagggagttgaccaactgcaaagagtgattgacaccatcaaaaccaaccctgacgacagaagaatcatcatgtgcgcttggaatccaagagatcttcctctgatggcgctgcctccatgccatgccctctgccagttctatgtggtgaacagtgagctgtcctgccagctgtaccagagatcgggagacatgggcctcggtgtgcctttcaacatcgccagctacgccctgctcacgtacatgattgcgcacatcacgggcctgaagccaggtgactttatacacactttgggagatgcacatatttacctgaatcacatcgagccactgaaaattcagcttcagcgagaacccagacctttcccaaagctcaggattcttcgaaaagttgagaaaattgatgacttcaaagctgaagactttcagattgaagggtacaatccgcatccaactattaaaatggaaatggctgtttagggtgctttcaaaggagctcgaaggatattgtcagtctttaggggttgggctggatgccgaggtaaaagttctttttgctctaaaagaaaaaggaactaggtcaaaaatctgtccgtgacctatcagttattaatttttaaggatgttgccactggcaaatgtaactgtgccagttctttccataataaaaggctttgagttaactcactgagggtatctgacaatgctgaggttatgaacaaagtgaggagaatgaaatgtatgtgctcttagcaaaaacatgtatgtgcatttcaatcccacgtacttataaagaaggttggtgaatttcacaagctatttttggaatatttttagaatattttaagaatttcacaagctattccctcaaatctgagggagctgagtaacaccatcgatcatgatgtagagtgtggttatgaactttaaagttatagttgttttatatgttgctataataaagaagtgttctgc

SEQ ID NO: 24 - DNA, 3127 bp, Mouse
gtcgctgactacactgctgccagactgctccgttatgctggtggttggctccgagctgcagtccgatgctcagcagctgagcgcggaagccccacggcatggagaactccagtacctgaggcaggtggagcacattttgcgctgcggcttcaagaaggaggaccgcacgggcactggcaccctgtcggtgttcggcatgcaggcacgatacagcctgagagatgaatttcctctgctcacaaccaaacgagtgttctggaagggtgttttggaggagttgttgtggtttatcaagggatccacaaatgctaaagaattgtcctcaaagggagtgagaatctgggatgccaatggatcccgagattttctggacagcttgggattttctgcccgacaggaaggggacctgggcccagtttatggtttccaatggaggcattttggagcagagtacaaagatatggattcagattactcgggacaaggagtagaccagctgcaaaaagtgattgacaccatcaaaaccaaccctgatgacagaagaatcatcatgtgtgcctggaacccaaaagatcttcccctgatggcactgcctccttgccatgccctctgtcagttctatgtggtgaatggggaactgtcttgccagctttaccagaggtcaggagatatgggtctgggcgtgcccttcaacattgccagctatgctctgctcacctacatgattgcacatatcacaggcctgcagccaggtgattttgtccacactttgggagatgcacatatttacctgaatcatatagagccgctgaaaattcagctacagcgagaaccaagacctttcccaaagctcaaaatccttcgaaaagttgagacaatcgatgatttcaaagttgaagactttcagattgaagggtataatccacatccaacgattaaaatggaaatggctgtttagagtgctttcagtgatgctatgaatatcaccgtttttttttttttaattaggtattttcctcatttacatttccaatgctataccaaaagtcccccataccctcccctccactcccctacccacccactcccacttcttggccctggcattcccttgtactggggcatataaagtttgcaagtccaatgggcctctctttccagtgatggccgactaggccatcttttgatacatatgcagctagagtcaagagctccggggtactggttagttcataatgttgttccacctatagggttgcagatccctttagctccttgggtactttctctagctcctccattgggggccctgtgatccatccaatagctgacagtgagcatccacttctgtgtacacctccaagagtagccattacagtcactcatggagtagcgtacgaagtacttcaggtagaagcacttgcagtccctcaaggcagaaccctcgaagtccttcaaggatgagccctcacattccctcatagaggattctatgcagtccctcaaggaggagccctcacagtcactcaatgaccacacacagtccatcaaggaaaagtcctcgcagtcgttcaaggaggaaccctctaagtccttcaaggatgagccctcacagtccctcatggaggaccccatgcagtccctcaaggaggagccctcacagttactcaaggacccaacacagcccatcaaggagaagtctttgtagttcctcaatgtggaacccacaaagtccttcaggatgagccctcacagttcctcatggaggacctcttgtagtcactcaaggaggagccctcacagtcacttaagcaccccacacagcacatcaaggagaagtccacccagtccttccagaaggaaccctcgaagtccttcaagtatgagccctcacagtccctcatggaggaccccatgcagtaacttgttgtgagccagctcatggctcacatggacagggtacacctgagtggcaggccagggctgaaagagaggggaactaggtggtcgagagaaaaatggagctaagtcaagattcctgatcaaagctcaaatgtttaatggcacatgctcttataaaggggggagggggaggcccattcccgccaattcattctaggagcccagctgcagttgacgacgtgcaggatagggtgaagttccagaatagctcagcagcctcccagcaggtagcagcatcttgaaggggaacagtggcagtggctgagcaatagagtgatctagggaggaaggctccaccctaggtaatctccttagtggcagaaaggtcaatgtctggctcagcctgcttcaggctgggggaggttacaatttcctccgttattaatattaaataagctggactgaggcataaaatttatgctctatagttctgcctgatttctttgggtctagtgaagaaacctgtctcagtgggattccctaactttttctcattgtaaacccacctattcgctaggccatggtgaatacccttgtctgggtaagactggctactgtcccaagtaaatactctgtagactagccctgagctattctatctcattctttgtaatgcctaattagtttcattgtctcttccaagctcctcggcttcaagcattttctaggacattggaacagtggccaaggcttagctatgtcagaattcaatcttaaaaggcacttataataagataatactaaaagagagcacgtggagccatacaccagactaacgtggggatagggtatgagtatacaggttatgagaacactaaagttccaggaggtgagtttctgtgaaaaactctgcctcgtgagtgctcccaggcacctctgcctgccaagcaaacttcactgtagtgtgtgtagcattctccccctttctttttatattcaggagtgctctaaacacaacgatttactaatagaatagtgccaataatagcaagttgaatatatatatctcccaatctaggagattcaatgcacttaggttttttttgtttgtttgtttgttttgttttttatctctggccaattcatcaatgttccaagtgtccaagtgacttttgctaatatctgaaacttctgcctttctagccttaatatatgctatgtcctg

SEQ ID NO: 25 - DNA, 3644 bp, Human
atggcagcccggcggcagggcctggcgaggagcgcgagcccgcggccgcagttcccaggcgtctgcgggcgcgagcacgccgcgaccctgcgtgcgccggggcgggggggcggggcctcgcctgcacaaatggggacgaggcggggcggccacaatttcgcgccaaacttgaccgcgcgttctgctgtaacgagcgggctcggaggtcctcccgctgctgtcatggttggttcgctaaactgcatcgtcgctgtgtcccagaacatgggcatcggcaagaacggggacctgccctggccaccgctcaggaatgaattcagatatttccagagaatgaccacaacctcttcagtagaaggtaaacagaatctggtgattatgggtaagaagacctggttctccattcctgagaagaatcgacctttaaagggtagaattaatttagttctcagcagagaactcaaggaacctccacaaggagctcattttctttccagaagtctagatgatgccttaaaacttactgaacaaccagaattagcaaataaagtagacatggtctggatagttggtggcagttctgtttataaggaagccatgaatcacccaggccatcttaaactatttgtgacaaggatcatgcaagactttgaaagtgacacgttttttccagaaattgatttggagaaatataaacttctgccagaatacccaggtgttctctctgatgtccaggaggagaaaggcattaagtacaaatttgaagtatatgagaagaatgattaatatgaaggtgttttctagtttaagttgttccccctccctctgaaaaaagtatgtatttttacattagaaaaggttttttgttgactttagatctataattatttctaagcaactagtttttattccccactactcttgtctctatcagataccatttatgagacattcttgctataactaagtgcttctccaagaccccaactgagtccccagcacctgctacagtgagctgccattccacacccatcacatgtggcactcttgccagtccttgacattgtcgggcttttcacatgttggtaatatttattaaagatgaagatccacatacccttcaactgagcagtttcactagtggaaataccaaaagcttcctacgtgtatatccagaggtttgtagataaatgttgccaccttgtttgtaacagtgaaaaattgaaaacaacctggaagtccagtgatgggaaaatgagtatgtttctgtcttagattggggaacccaaagcagattgcaagactgaaatttcagtgaaagcagtgtatttgctaggtcataccagaaatcatcaattgaggtacggagaaactgaactgagaaggtaagaaaagcaatttaaagtcagcgagcaggttctcattgataacaagctccatactgctgagatacagggaaatggaggggggaaagctggagtattgatcccgcccccctccttggttgtcagctccctgtcctgtgtgtgggcggaacatagtccagctgctctatagcaagtctcaggtgtttgcagtaagaagctgctggcatgcacgggaacagtgaatgccaaacacttaaagcaattcgatgtttaagtatgtaagttcttttttttttagacagcgtttcgctcttgttgcccaggctagcatgcaatggtgtgacctcggcttactgcaacctccgccttcccagattcaagcgattctcctgcctcaggctcccaagtagctaggaccaggtgcgcgccaccacgcccggctaatttttgtattttgtatttttagtagagatggggtttcaccatgttggtcaggctagtctcgaactcgtgaccgcaagcgattcacccacctcagcctcccaaagtgctgggattaccggcttgagccaccacacccggcacatcttcattctttttatgtagtaaaaagtataaggccacacatggtttatttgaagtattttataatttaaaaaaatacagaagcaggaaaaccaattataagttcaagtgagggatgatggttgcttgaaccaaagggttgcatgtagtaagaaattgtgatttaagatatattttaaagttataagtagcaggatattctgatggagtttgactttggttttgggcccagggagtttcagatgcctttgagaaatgaatgaagtagagagaaaataaaagaaaaaccagccaggcacagtggctcacacctgtaatcccagcgctttgggaggctaaggcaggcagatcacttgagaccagcttgggcaacatggcaaagccccatctctacaaaaaacacaaaaattagctgggcattgtggcgcacacctgtattcccatctagtcaggaagctgagatggaagaattaattgagcccacgagttcaaggctgcagtgagtcgtgattgtgccactgcactccagccggggtgacagaagagaccttgtctcgaaaaggaatctgaaaacaatggaaccatgccttcataattctagaaagttattttcaactgataaatctatattcacccaaataatcaagggtgaaggtaaaataatacatttttagacaagcaaagactcaggggttacctccatgtgccctttttagggaagctgttggagaaaatactccagcaaaatgaaggagtacacaaaccagagaatgacatgaatccagcaaataggatccaacacaggcaatattccagctatggagctagctttaaaaaggaacagtaaaaatattaatcggttagctgggtggaatggcccatgcctgtagtcccagctactcaggaggctcagcagcaggacgacttgagcccaagagttccagaccagcctggccaccttagtgagatcccttctcttaaaaataataacttattgccagatttggggcatttggaaagaagttcattgaagataaagcaaaagtaaaaaaaaaaaaaaaaaaaacaaggggaaagggttggttaggcaatcattctagggcagaaagaagtacaggataggaagagcataatacactgtttttctcaacaaggagcagtatgtacacagtcataatgatgtgactgcttagcccctaaatatggtaactactctgggacaatatgggaggaaaagtgaagattgtgatggtgtaagagctaaatcctcatctgtcatatccagaaatcactatataatatataataatgaaatgactaagttatgtgaggaaaaaaacagaagacattgctaaaagagttaaaagtcattgctctggagaattaggagggatggggcaggggactgttaggatgcattataaactgaaaagcctttttaaaattttatgtattaatatatgcattcacttgaaaaactaaaaaaaaacaataatttggaaaaacccatgaaggtaactaacggaaggaaaaactaagagaatgaaaagtatttgcctctggaaagaacaactggcaggactgttgttttcattgtaagacttttggagccatttaattgtacttaaccattttcatctatttctttaataagaacaattccatcttaataaagagttacacttgttaata

SEQ ID NO: 26 - DNA, 753 bp, Human
atggaagagaagctgaagaaaaccaagatcatctttgtggtgggtgggcctggctcagggaagggcacccagtgtgagaagatcgtgcagaagtatggctacacccacctctccaccggggacctcctgcggtccgaggtcagctcaggctcggccaggggcaagaagctgtcggaaatcatggagaaggggcagctggttccactggagacagtgttggacatgctccgggatgccatggtggccaaagtcaatacttccaaaggcttcctgattgatggctacccgcgggaggtgcagcaaggagaagagtttgagcgacggattggacagcccacactgctgctgtatgtggacgcaggccctgagaccatgacccagcggctcttgaaacgtggagagaccagcgggcgtgtggacgacaatgaggagaccatcaaaaagcggctggagacctattacaaggccacagaacctgtcatcgccttctatgagaaacgtggcattgtgcgcaaggtcaacgctgagggctccgtggacagtgtcttctcccaggtctgcacccacctggacgccctaaagtagcaacgctggagccgcttccccagctcagagccccgccccaccccgtcctgattcgaggtcctcctggcctgagcgcagcgcctccaccctgccctgctgagcacagacggaggaagccgcttatcctgttttcatggacagctgagcactaaaggaatttctaaggac

SEQ ID NO: 27 - DNA, 2428 bp, Human
aacggatgggcggggagggggcggggccgggcaacccggaaggtccggcgtcccagccgcctacctcgctgggaccctggtcttgctgtcccccgctggcctcctgcccaagcgactgcggccaggatgggccggaaggtgaccgtggccacctgcgcactcaaccagtgggccctggacttcgagggcaatttgcaaagaattttaaagagtattgaaattgccaaaaacagaggagcaagatacaggcttggaccagagctggaaatatgcggctacggatgttgggatcattattacgagtcggacaccctcttgcactcgtttcaagtcctagcggcccttgtggagtctcccgtcactcaggacatcatctgcgacgtggggatgcctgtaatgcaccgaaacgtccgctacaactgcagagtgatattcctcaacaggaagatcctgctcatcagacccaagatggccttggccaatgaaggcaactaccgcgagctgcgctggttcaccccgtggtcgaggagtcggcacacagaggagtactttctgcctcggatgatacaggacctgacaaagcaggaaaccgtacccttcggagatgcggtgctggtgacatgggacacctgcattggaagtgagatctgtgaggagctctggacaccccacagcccgcacatcgacatgggcctggatggcgtggagatcatcaccaacgcctcgggcagccaccaagtgctgcgcaaagccaacaccagggtggatctcgtgactatggtcaccagcaagaacggtgggatttacttgctggccaaccagaagggttgtgacggggaccgcctgtactacgacggctgtgccatgattgccatgaacggaagcgtctttgctcaaggatcccagttttctctggatgacgtggaagtcctgacggccacgctggatctggaggacgtccggagctacagggcggagatttcatctcgaaacctggcggccagcagggcgagcccctaccccagagtgaaggtggactttgccctctcgtgccacgaggacttgctggcacccatctctgagcccatcgagtggaaataccacagccctgaggaggagataagccttggacctgcctgctggctctgggattttttaagacgaagtcaacaggcagggtttttgctgcccttgagtggcggggtggacagcgcagccaccgcctgcctcatctactccatgtgctgccaggtctgcgaggccgtgaggagtggaaatgaggaagtgctggctgatgtccgcaccatcgtgaaccagatcagctacaccccccaggatccccgagacctctgtggacgcatactgaccacctgctacatggccagcaagaactcctcccaggagacgtgcacccgggccagagagttggcccagcagattggaagccaccacatcagtctcaacatcgatccagccgtgaaggccgtcatgggcatcttcagcctggtgacggggaagagccctctgtttgcagctcatggaggaagcagcagggaaaacctggcgctgcaaaatgtgcaggctcgaatacggatggtcctcgcctatctgtttgctcagttgagcctctggtctcggggtgtccacggtgggctcctcgtgctgggatccgccaacgtggatgagagtctcctgggctacctgaccaagtacgactgctccagtgcggacatcaaccccataggcgggatcagcaagacggacctcagggccttcgtccagttctgcatccagcgcttccagcttcctgccctgcagagcatcctgttggcgccggccaccgcagagctggagcccttggctgatggacaggtgtcccagaccgacgaggaagatatggggatgacatatgcggagctctcggtctatgggaaactcaggaaggtggccaagatggggccctacagcatgttctgcaaactcctcggcatgtggagacacatctgcaccccgagacaggtcgctgacaaagtgaagcggtttttctccaagtactccatgaacagacacaagatgaccacgctcacacccgcgtaccacgccgagaactacagccctgaggacaacaggtttgatctgcgaccatttctgtacaacacaagctggccttggcagtttcggtgcatagaaaatcaggtgctacagctcgagagggcagagccacagtccctggacggcgtggactgaggccggttccttcctggaggcctcctgtcctcggggaccccagcacctcatcatcagcattgctggagccaagggtaggagccctacactaggagcccaggatgggacggcgcatcagccgagagggagggaacttttcagtcaaattcctcaaaaagaggctggaataaagcctgggctt

SEQ ID NO: 28 - DNA, 2192 bp, Human
cccgggacatgaggaaaggaacaagggaaagagccggtgaaggggcagaacaggcaggtgagagtctaagagggctcagtaatctgaagcttggtgggaagaagggattctgggctagaaagggtgcagaagcctgaagtagaaagagacgggattttggtccggggtggagagcgaatgcattgaaaagggccaaggcccaggataaggtagacatttaaaggggtacggatgcccaaggtagagcagacacttgaggagaccagctcagcaaacggaagacacttaaagtggtaggttctcaagagagaagaagtttttaagactagagctaagcaagacatttaaaaggacatgggttgggatttgggaacacgtttattccagaggcaggaacaaaggagtcgcttgtcaaggatctggttagagaagactagggtcttcctcgaaggaagcacgcgcacgcctgctctcccccattgtcttttctggcttctccaggttccctcgacccaggaccccctgttcccaggctatggcccccagtgccctgtagacctggcaggccccccgtgcttgcgacccctatttgggggtctgggtggctactggagggccttgcagaggggcagagaaggcaggaccatgacatctagggcctctgaactttctccggggcgcagcgtgacggctggcatcatcattgttggagatgagatccttaagggacacactcaggacaccaacaccttctttctgtgccggacactgcgctccctaggggtccaggtttgccgagtctcagttgtacctgatgaggtagccaccattgcagctgaggtcacttctttctccaaccgcttcacccatgtcctcacagcagggggcatcggccccactcatgatgatgtgacctttgaggcagtggcacaggcctttggagatgagctgaagccacaccccaagttggaagcagccaccaaagccctaggaggggaaggctgggagaagctatcattggtgccctcctctgcccgcctgcattatggcacagatccttgcactggtcaacctttcagattccctctggtctccgtccgaaacgtctacctcttcccaggcattccagagctgctgcggcgggtgctggaggggatgaagggactattccaaaacccagctgttcagttccactcaaaggagctatatgtggctgctgatgaagcctccatcgcccccattctggctgaggcccaggcccactttggacgtaggcttggcctgggttcctaccctgactggggcagcaactactatcaggtgaagctgactctagactcagaggaagaaggacccctggaggaatgcttggcctacctgactgcccgtttgccccagggatcgctggtcccctacatgcccaacgctgtggagcaggccagtgaggctgtatacaaactcgctgaatcagggtcttctttggggaaaaaggtggcaggtgccctacagaccattgagacctccctggctcagtacagcctcacccagctctgtgtgggcttcaacgggggcaaagactgcactgccctcctgcacctcttccatgcagctgtgcagaggaaattacctgatgttccaaaccccctccagatcctgtatatccgcagcatctcccctttccctgagctggaacagtttctacaggacactatcaagaggtataatctgcagatgttggaagctgagggcagcatgaagcaggccctgggtgaactgcaggcacggcacccccagctggaggctgtccttatgggcacccgccggactgacccctactcctgtagcctctgccctttcagccccactgacccaggctggcccgcattcatgcgcatcaacccactgctggactggacctacagagacatctgggattttctgcgtcagctgtttgtcccatactgtatcctgtatgaccgaggatacacatcactggggagtcgggagaataccgtgcggaacccggccctgaagtgcctgagcccaggaggacaccccacataccgtccagcctatctactggagaacgaagaagaggagcggaactcccgcacatgacctcccaccctaggagggagggaaggacaccgtcctagggtataacctggcaataaaccgtgcctctcactgtg

SEQ ID NO: 29 - DNA, 668 bp, Human
gcagcaagatggcggcggtctcaatgtcagtggtactgaggcagacgttgtggcggagaagggcagtggctgtagctgccctttccgtttccagggttccgaccaggtcgttgaggacttccacatggagattggcacaggaccagactcaagacacacaactcataacagttgatgaaaaattggatatcactactttaactggcgttccagaagagcatataaaaactagaaaagtcaggatctttgttcctgctcgcaataacatgcagtctggagtaaacaacacaaagaaatggaagatggagtttgataccagggagcgatgggaaaatcctttgatgggttgggcatcaacggctgatcccttatccaacatggttctaaccttcagtactaaagaagatgcagtttcctttgcagaaaaaaatggatggagctatgacattgaagagaggaaggttccaaaacccaagtccaagtcttatggtgcaaacttttcttggaacaaaagaacaagagtatccacaaaataggttggcactgactatatctctgcttgactgtgaataaagtcagctatgcagtatttatagtccatgtataataaatacatctcttaatctcctaataaattggacctttaaactacaaaaaaaaaaaaaaaa

SEQ ID NO: 30 - DNA, 2307 bp, Human
actatccaaaacatttctattttcctaacacaaaaactatagctaagtttttatattctatgtagccccagcctaggacgtaaattccacgagaccaaaagccttgtgatgattccccgaggttgctgaccctcccggtgtgtcccgggcctgctctgggggacacagcggcgaatacgttgaacgaggcccctgtttcacggagctaaagatccagtaaggacttcacccagcgagaggcaactacgccgggcttcgatacccaatacctctgcagaaaggtggagtggcaggaatctcctgaagcctccaacgtccaggaacgcggaaacccagggcctccagtgcaggtgtcatcccggagggcgcatgcggagtcccaagagaggcgcgtcccattggacaatgctgagcggaagagcccaagatagcggggggagttgtgacaggctgctgcagacgtacttagaaaaggggtgcatactggatattcaggctaggagaagaacgcaaaaagcagtgacgtacattattctctgcatatatttacttgggaaattgtgcgtctccctattctgagtcttggaggaattggactggtccaaccttataaagagagcagtagagcgcggcagtatagagagtacctcacgaaggggacgtgggaaagtgttagcggggaacgctgggaaactcccggcctccgccaccatcttgctttcctttaatccggcagtgaccgtgtgtcagaacaatcttgaatcatgaagctactaaccagagccggctctttctcgagattttattccctcaaagttgcccccaaagttaaagccacagctgcgcctgcaggagcaccgccacaacctcaggaccttgagtttaccaagttaccaaatggcttggtgattgcttctttggaaaactattctcctgtatcaagaattggtttgttcattaaagcaggcagtagatatgaggacttcagcaatttaggaaccacccatttgctgcgtcttacatccagtctgacgacaaaaggagcttcatctttcaagataacccgtggaattgaagcagttggtggcaaattaagtgtgaccgcaacaagggaaaacatggcttatactgtggaatgcctgcggggtgatgttgatattctaatggagttcctgctcaatgtcaccacagcaccagaatttcgtcgttgggaagtagctgaccttcagcctcagctaaagattgacaaagctgtggcctttcagaatccgcagactcatgtcattgaaaatttgcatgcagcagcttaccggaatgccttggctaatcccttgtattgtcctgactataggattggaaaagtgacatcagaggagttacattacttcgttcagaaccatttcacaagtgcaagaatggctttgattggacttggtgtgagtcatcctgttctaaagcaagttgctgaacagtttctcaacatgaggggtgggcttggtttatctggtgcaaaggccaactaccgtggaggtgaaatccgagaacagaatggagacagtcttgtccatgctgcttttgtagcagaaagtgctgtcgcgggaagtgcagaggcaaatgcatttagtgttcttcagcatgtcctcggtgctgggccacatgtcaagaggggcagcaacaccaccagccatctgcaccaggctgttgccaaggcaactcagcagccatttgatgtttctgcatttaatgccagttactcagattctggactctttgggatttatactatctcccaggccacagctgctggagatgttatcaaggctgcctataatcaagtaaaaacaatagctcaaggaaacctttccaacacagatgtccaagctgccaagaacaagctgaaagctggatacctaatgtcagtggagtcttctgagtgtttcctggaagaagtcgggtcccaggctctagttgctggttcttacatgccaccatccacagtccttcagcagattgattcagtggctaatgctgatatcataaatgcggcaaagaagtttgtttctggccagaagtcaatggcagcaagtggaaatttgggacatacaccttttgttgatgagttgtaatactgatgcacacattacaggagagagctgaacgttctctcagcccagagcagcaaacacatgaaagtcagaagtctctaatatatcatttgtcttttttccagtgaggtaaaataaggcataaatgcaggtaattattcccagctgacctaaagtcaataaaacattctgtttaagtgtt

SEQ ID NO: 31 - DNA, 736 bp, Human
gggcctacgtgctccgcccgctgtgagcctgtccggcccccgcccgctccggagcaacccgcgagcttacaccggcttctctctgtcctcagcccgcgcgccgccatcgccgtcatgctgggcgccgctctccgccgctgcgctgtggccgcaaccacccgggccgaccctcgaggcctcctgcactccgcccggacccccggccccgccgtggctatccagtcagttcgctgctattcccatgggtcacaggagacagatgaggagtttgatgctcgctgggtaacatacttcaacaagccagatatagatgcctgggaattgcgtaaagggataaacacacttgttacctatgatatggttccagagcccaaaatcattgatgctgctttgcgggcatgcagacggttaaatgattttgctagtacagttcgtatcctagaggttgttaaggacaaagcaggacctcataaggaaatctacccctatgtcatccaggaacttagaccaactttaaatgaactgggaatctccactccggaggaactgggccttgacaaagtgtaaaccgcatggatgggcttccccaaggatttattgacattgctacttgagtgtgaacagttacctggaaatactgatgataacatattaccttatttgaacaagttttcctttattgagtaccaagccatgtaatggtaacttggactttaataaaagggaaatgagtttg

SEQ ID NO: 32 - DNA, 1839 bp, Human
agttcacccaatggacctgcctactgcagcgtaggcctcgcctcaacggcaggagagcaggcggctgcggttgctgcagccttcagtctccacccggactacgccatgttggggtttgtgggtcgggtggccgctgctccggcctccggggccttgcggagactcaccccttcagcgtcgctgcccccagctcagctcttactgcgggccgctccgacggcggtccatcctgtcagggactatgcggcgcaaacatctccttcgccaaaagcaggcgccgccaccgggcgcatcgtggcggtcattggcgcagtggtggacgtccagtttgatgagggactaccaccaattctaaatgccctggaagtgcaaggcagggagaccagactggttttggaggtggcccagcatttgggtgagagcacagtaaggactattgctatggatggtacagaaggcttggttagaggccagaaagtactggattctggtgcaccaatcaaaattcctgttggtcctgagactttgggcagaatcatgaatgtcattggagaacctattgatgaaagaggtcccatcaaaaccaaacaatttgctcccattcatgctgaggctccagagttcatggaaatgagtgttgagcaggaaattctggtgactggtatcaaggttgtcgatctgctagctccctatgccaagggtggcaaaattgggctttttggtggtgctggagttggcaagactgtactgatcatggagttaatcaacaatgtcgccaaagcccatggtggttactctgtgtttgctggtgttggtgagaggacccgtgaaggcaatgatttataccatgaaatgattgaatctggtgttatcaacttaaaagatgccacctctaaggtagcgctggtatatggtcaaatgaatgaaccacctggtgctcgtgcccgggtagctctgactgggctgactgtggctgaatacttcagagaccaagaaggtcaagatgtactgctatttattgataacatctttcgcttcacccaggctggttcagaggtgtctgcattattgggccgaatcccttctgctgtgggctatcagcctaccctggccactgacatgggtactatgcaggaaagaattaccactaccaagaagggatctatcacctctgtacaggctatctatgtgcctgctgatgacttgactgaccctgcccctgctactacgtttgcccatttggatgctaccactgtactgtcgcgtgccattgctgagctgggcatctatccagctgtggatcctctagactccacctctcgtatcatggatcccaacattgttggcagtgagcattacgatgttgcccgtggggtgcaaaagatcctgcaggactacaaatccctccaggatatcattgccatcctgggtatggatgaactttctgaggaagacaagttgaccgtgtcccgtgcacggaaaatacagcgtttcttgtctcagccattccaggttgctgaggtcttcacaggtcatatggggaagctggtacccctgaaggagaccatcaaaggattccagcagattttggcaggtgaatatgaccatctcccagaacaggccttctatatggtgggacccattgaagaagctgtggcaaaagctgataagctggctgaagagcattcatcgtgaggggtctttgtcctctgtactgtctctctccttgcccctaacccaaaaagcttcatttttctgtgtaggctgcacaagagccttgattgaagatatattctttctgaacagtatttaaggtttccaataaaatgtacacccctc

SEQ ID NO: 33 - DNA, 1340 bp, Human
ggggagctgcgggccaggcggcggccccctagcgtcgcgcagggtcggggactgcgcggcggtgccaggccgggcgtgggcgagagcacgaacgggctgcctgcgggctgagagcgtcgagctgtcaccatgggtgatcacgcttggagcttcctaaaggacttcctggccgggggcgtcgccgctgccgtctccaagaccgcggtcgcccccatcgagagggtcaaactgctgctgcaggtccagcatgccagcaaacagatcagtgctgagaagcagtacaaagggatcattgattgtgtggtgagaatccctaaggagcagggcttcctctccttctggaggggtaacctggccaacgtgatccgttacttccccacccaagctctcaacttcgccttcaaggacaagtacaagcagctcttcttagggggtgtggatcggcataagcagttctggcgctactttgctggtaacctggcgtccggtggggccgctggggccacctccctttgctttgtctacccgctggactttgctaggaccaggttggctgctgatgtgggcaagggcgccgcccagcgtgagttccatggtctgggcgactgtatcatcaagatcttcaagtctgatggcctgagggggctctaccagggtttcaacgtctctgtccaaggcatcattatctatagagctgcctacttcggagtctatgatactgccaaggggatgctgcctgaccccaagaacgtgcacatttttgtgagctggatgattgcccagagtgtgacggcagtcgcagggctggtgtcctacccctttgacactgttcgtcgtagaatgatgatgcagtccggccggaaaggggccgatattatgtacacggggacagttgactgctggaggaagattgcaaaagacgaaggagccaaggccttcttcaaaggtgcctggtccaatgtgctgagaggcatgggcggtgcttttgtattggtgttgtatgatgagatcaaaaaatatgtctaatgtaattaaaacacaagttcacagatttacagtgaacttgatctacaagttcacagatccattgtgtggtttaatagactattcctaggggaagtaaaaagatctgggataaaaccagactgaaaggaatacctcagaagagatgcttcattgagtgttcattaaaccacacatgtattttgtatttattttacatttaaattcccacagcaaatagaaaataatttatcatacttgtacaattaactgaagaattgataataactgaatgtgaaacatcaataaagaccacttaatgcaaaaaaaaaaaaaaa

SEQ ID NO: 34 - DNA, 1225 bp, Human
ccgcagcgccggagtcaaacggttcccggcccagtcccgtcctgcagcagtctgcctcctctttcaacatgacagatgccgctgtgtccttcgccaaggacttcctggcaggtggagtggccgcagccatctccaagacggcggtagcgcccatcgagcgggtcaagctgctgctgcaggtgcagcatgccagcaagcagatcactgcagataagcaatacaaaggcattatagactgcgtggtccgtattcccaaggagcagggagttctgtccttctggcgcggtaacctggccaatgtcatcagatacttccccacccaggctcttaacttcgccttcaaagataaatacaagcagatcttcctgggtggtgtggacaagagaacccagttttggcgctactttgcagggaatctggcatcgggtggtgccgcaggggccacatccctgtgttttgtgtaccctcttgattttgcccgtacccgtctagcagctgatgtgggtaaagctggagctgaaagggaattccgaggcctcggtgactgcctggttaagatctacaaatctgatgggattaagggcctgtaccaaggctttaacgtgtctgtgcagggtattatcatctaccgagccgcctacttcggtatctatgacactgcaaagggaatgcttccggatcccaagaacactcacatcgtcatcagctggatgatcgcacagactgtcactgctgttgccgggttgacttcctatccatttgacaccgttcgccgccgcatgatgatgcagtcagggcgcaaaggaactgacatcatgtacacaggcacgcttgactgctggcggaagattgctcgtgatgaaggaggcaaagcttttttcaagggtgcatggtccaatgttctcagaggcatgggtggtgcttttgtgcttgtcttgtatgatgaaatcaagaagtacacataagttatttcctaggatttttccccctgtgaacaggcatgttgtattctataacacaatcttgagcattcttgacagactcctggctgtcagtttctcagtggcaactactttactggttgaaaatgggaagcaataatattcatctgaccagttttcctctaaagccatttccatgatgatgatgatgggactcaattgtattttttatttcagtcactcctgataaataacaaatttggagaaataaaaatatctaaaat

SEQ ID NO: 35 - DNA, 1455 bp, Human
ggcggcggcagggctgagccagcgacgccctccattcactctccgcgcccgttctccggctgtcctcccgttccgctgcccgccctgccaccatgacggaacaggccatctccttcgccaaagacttcttggccggaggcatcgccgccgccatctccaagacggccgtggctccgatcgagcgggtcaagctgctgctgcaggtccagcacgccagcaagcagatcgccgccgacaagcagtacaagggcatcgtggactgcattgtccgcatccccaaggagcagggcgtgctgtccttctggaggggcaaccttgccaacgtcattcgctacttccccactcaagccctcaacttcgccttcaaggataagtacaagcagatcttcctggggggcgtggacaagcacacgcagttctggaggtactttgcgggcaacctggcctccggcggtgcggccggcgcgacctccctctgcttcgtgtacccgctggattttgccagaacccgcctggcagcggacgtgggaaagtcaggcacagagcgcgagttccgaggcctgggagactgcctggtgaagatcaccaagtccgacggcatccggggcctgtaccagggcttcagtgtctccgtgcagggcatcatcatctaccgggcggcctacttcggcgtgtacgatacggccaagggcatgctccccgaccccaagaacacgcacatcgtggtgagctggatgatcgcgcagaccgtgacggccgtggccggcgtggtgtcctaccccttcgacacggtgcggcggcgcatgatgatgcagttcgggcgcaaaggagctgacatcatgtacacgggcaccgtcgactgttggaggaagatcttcagagatgaggggggcaaggccttcttcaagggtgcgtggtccaacgtcctgcggggcatggggggcgccttcgtgctggtcctgtacgacgagctcaagaaggtgatctaagggccgcggcctcctccacacacacacacaccaggggaaccaagagaaccacgtagaatcctcaaccgtgcggaccatcaaccttcgagaaattccagttgtctttttcccagccgcatcctgcctgtagatggccggggaaggctctagaaaaggggcgcattgcgatccaaccatcggcagccgattccgtgtcttgatcacggggtgggagggaaccgtggcgtccctgcgtggggcccatgggtgagacactccagtactgagacctagagtccagatgcttgtaggagccaagtcgtgttctaagtatttatttaaaacaaaagaatcacgttttcccatttgtacttcagcgctagcccctgttttgcacagccgagtactggcgagtatgttctatgttgggcctcctgctgcaaaacaataaacagaggacgcagaggtcaaaaaaaaaaaaaaaaaa

SEQ ID NO: 36 - DNA, 8481 bp, Human
gagagacggcagcggccccggcctccctctccgccgcgcttcagcctcccgctccgccgcgctccagcctcgctctccgccgcccgcaccgccgcccgcgccctcaccagagcagccatggaggaggtggtgattgccggcatgtccgggaagctgccagagtcggagaacttgcaggagttctgggacaacctcatcggcggtgtggacatggtcacggacgatgaccgtcgctggaaggcggggctctacggcctgccccggcggtccggcaagctgaaggacctgtctaggtttgatgcctccttcttcggagtccaccccaagcaggcacacacgatggaccctcagctgcggctgctgctggaagtcacctatgaagccatcgtggacggaggcatcaacccagattcactccgaggaacacacactggcgtctgggtgggcgtgagcggctctgagacctcggaggccctgagccgagaccccgagacactcgtgggctacagcatggtgggctgccagcgagcgatgatggccaaccggctctccttcttcttcgacttcagagggcccagcatcgcactggacacagcctgctcctccagcctgatggccctgcagaacgcctaccaggccatccacagcgggcagtgccctgccgccatcgtggggggcatcaatgtcctgctgaagcccaacacctccgtgcagttcttgaggctggggatgctcagccccgagggcacctgcaaggccttcgacacagcggggaatgggtactgccgctcggagggtgtggtggccgtcctgctgaccaagaagtccctggcccggcgggtgtacgccaccatcctgaacgccggcaccaatacagatggcttcaaggagcaaggcgtgaccttcccctcaggggatatccaggagcagctcatccgctcgttgtaccagtcggccggagtggcccctgagtcatttgaatacatcgaagcccacggcacaggcaccaaggtgggcgacccccaggagctgaatggcatcacccgagccctgtgcgccacccgccaggagccgctgctcatcggctccaccaagtccaacatggggcacccggagccagcctcggggctggcagccctggccaaggtgctgctgtccctggagcacgggctctgggcccccaacctgcacttccatagccccaaccctgagatcccagcgctgttggatgggcggctgcaggtggtggaccagcccctgcccgtccgtggcggcaacgtgggcatcaactcctttggcttcgggggctccaacgtgcacatcatcctgaggcccaacacgcagccgccccccgcacccgccccacatgccaccctgccccgtctgctgcgggccagcggacgcacccctgaggccgtgcagaagctgctggagcagggcctccggcacagccaggacctggctttcctgagcatgctgaacgacatcgcggctgtccccgccaccgccatgcccttccgtggctacgctgtgctgggtggtgagcgcggtggcccagaggtgcagcaggtgcccgctggcgagcgcccgctctggttcatctgctctgggatgggcacacagtggcgcgggatggggctgagcctcatgcgcctggaccgcttccgagattccatcctacgctccgatgaggctgtgaagccattcggcctgaaggtgtcacagctgctgctgagcacagacgagagcacctttgatgacatcgtccattcgtttgtgagcctgactgccatccagataggcctcatagacctgctgagctgcatggggctgaggccagatggcatcgtcggccactccctgggggaggtggcctgtggctacgccgacggctgcctgtcccaggaggaggccgtcctcgctgcctactggaggggacagtgcatcaaagaagcccatctcccgccgggcgccatggcagccgtgggcttgtcctgggaggagtgtaaacagcgctgccccccgggcgtggtgcccgcctgccacaactccaaggacacagtcaccatctcgggacctcaggccccggtgtttgagttcgtggagcagctgaggaaggagggtgtgtttgccaaggaggtgcggaccggcggtatggccttccactcctacttcatggaggccatcgcacccccactgctgcaggagctcaagaaggtgatccgggagccgaagccacgttcagcccgctggctcagcacctctatccccgaggcccagtggcacagcagcctggcacgcacgtcctccgccgagtacaatgtcaacaacctggtgagccctgtgctgttccaggaggccctgtggcacgtgcctgagcacgcggtggtgctggagatcgcgccccacgccctgctgcaggctgtcctgaagcgtggcctgaagccgagctgcaccatcatccccctgatgaagaaggatcacagggacaacctggagttcttcctggccggcatcggcaggctgcacctctcaggcatcgacgccaaccccaatgccttgttcccacctgtggagttcccagctccccgaggaactcccctcatctccccactcatcaagtgggaccacagcctggcctgggacgtgccggccgccgaggacttccccaacggttcaggttccccctcagccgccatctacaacatcgacaccagctccgagtctcctgaccactacctggtggaccacaccctcgacggtcgcgtcctcttccccgccactggctacctgagcatagtgtggaagacgctggcccgcgccctgggcctgggcgtcgagcagctgcctgtggtgtttgaggatgtggtgctgcaccaggccaccatcctgcccaagactgggacagtgtccctggaggtacggctcctggaggcctcccgtgccttcgaggtgtcagagaacggcaacctggtagtgagtgggaaggtgtaccagtgggatgaccctgaccccaggctcttcgaccacccggaaagccccacccccaaccccacggagcccctcttcctggcccaggctgaagtttacaaggagctgcgtctgcgtggctacgactacggccctcatttccagggcatcctggaggccagcctggaaggtgactcggggaggctgctgtggaaggataactgggtgagcttcatggacaccatgctgcagatgtccatcctgggctcggccaagcacggcctgtacctgcccacccgtgtcaccgccatccacatcgaccctgccacccacaggcagaagctgtacacactgcaggacaaggcccaagtggctgacgtggtggtgagcaggtggctgagggtcacagtggccggaggcgtccacatctccgggctccacactgagtcggccccgcggcggcagcaggagcagcaggtgcccatcctggagaagttttgcttcactccccacacggaggaggggtgcctgtctgagcgcgctgccctgcaggaggagctgcaactgtgcaaggggctggtgcaggcactgcagaccaaggtgacccagcaggggctgaagatggtggtgcccggactggatggggcccagatcccccgggacccctcacagcaggaactgccccggctgttgtcggctgcctgcaggcttcagctcaacgggaacctgcagctggagctggcgcaggtgctggcccaggagaggcccaagctgccagaggaccctctgctcagcggcctcctggactccccggcactcaaggcctgcctggacactgccgtggagaacatgcccagcctgaagatgaaggtggtggaggtgctggctggccacggtcacctgtattcccgcatcccaggcctgctcagcccccatcccctgctgcagctgagctacacggccaccgaccgccacccccaggccctggaggctgcccaggccgagctgcagcagcacgacgttgcccagggccagtgggatcccgcagaccctgcccccagcgccctgggcagcgccgacctcctggtgtgcaactgtgctgtggctgccctcggggacccggcctcagctctcagcaacatggtggctgccctgagagaagggggctttctgctcctgcacacactgctccgggggcaccccctcggggacatcgtggccttcctcacctccactgagccgcagtatggccagggcatcctgagccaggacgcgtgggagagcctcttctccagggtgtcgctgcgcctggtgggcctgaagaagtccttctacggctccacgctcttcctgtgccgccggcccaccccgcaggacagccccatcttcctgccggtggacgataccagcttccgctgggtggagtctctgaagggcatcctggctgacgaagactcttcccggcctgtgtggctgaaggccatcaactgtgccacctcgggcgtggtgggcttggtgaactgtctccgccgagagcccggcgggaaccgcctccggtgtgtgctgctctccaacctcagcagcacctcccacgtcccggaggtggacccgggctccgcagaactgcagaaggtgttgcagggagacctggtgatgaacgtctaccgcgacggggcctggggggctttccgccacttcctgctggaggaggacaagcctgaggagccgacggcacatgcctttgtgagcaccctcacccggggggacctgtcctccatccgctgggtctgctcctcgctgcgccatgcccagcccacctgccctggcgcccagctctgcacggtctactacgcctccctcaacttccgcgacatcatgctggccactggcaagctgtcccctgatgccatcccagggaagtggacctcccaggacagcctgctaggtatggagttctcgggccgagacgccagcggcaagcgtgtgatgggactggtgcctgccaagggcctggccacctctgtcctgctgtcaccggacttcctctgggatgtgccttccaactggacgctggaggaggcggcctcggtgcctgtcgtctacagcacggcctactacgcgctggtggtgcgtgggcgggtgcgccccggggagacgctgctcatccactcgggctcgggcggcgtgggccaggccgccatcgccatcgccctcagtctgggctgccgcgtcttcaccaccgtggggtcggctgagaagcgggcgtacctccaggccaggttcccccagctcgacagcaccagcttcgccaactcccgggacacatccttcgagcagcatgtgctgtggcacacgggcgggaagggcgttgacctggtcttgaactccttggcggaagagaagctgcaggccagcgtgaggtgcttggctacgcacggtcgcttcctggaaattggcaaattcgacctttctcagaaccacccgctcggcatggctatcttcctgaagaacgtgacattccacggggtcctactggatgcgttcttcaacgagagcagtgctgactggcgggaggtgtgggcgcttgtgcaggccggcatccgggatggggtggtacggcccctcaagtgcacggtgttccatggggcccaggtggaggacgccttccgctacatggcccaagggaagcacattggcaaagtcgtcgtgcaggtgcttgcggaggagccggaggcagtgctgaagggggccaaacccaagctgatgtcggccatctccaagaccttctgcccggcccacaagagctacatcatcgctggtggtctgggtggcttcggcctggagttggcgcagtggctgatacagcgtggggtgcagaagctcgtgttgacttctcgctccgggatccggacaggctaccaggccaagcaggtccgccggtggaggcgccagggcgtacaggtgcaggtgtccaccagcaacatcagctcactggagggggcccggggcctcattgccgaggcggcgcagcttgggcccgtgggcggcgtcttcaacctggccgtggtcttgagagatggcttgctggagaaccagaccccagagttcttccaggacgtctgcaagcccaagtacagcggcaccctgaacctggacagggtgacccgagaggcgtgccctgagctggactactttgtggtcttctcctctgtgagctgcgggcgtggcaatgcgggacagagcaactacggctttgccaattccgccatggagcgtatctgtgagaaacgccggcacgaaggcctcccaggcctggccgtgcagtggggcgccatcggcgacgtgggcattttggtggagacgatgagcaccaacgacacgatcgtcagtggcacgctgccccagcgcatggcgtcctgcctggaggtgctggacctcttcctgaaccagccccacatggtcctgagcagctttgtgctggctgagaaggctgcggcctatagggacagggacagccagcgggacctggtggaggccgtggcacacatcctgggcatccgcgacttggctgctgtcaacctggacagctcactggcggacctgggcctggactcgctcatgagcgtggaggtgcgccagacgctggagcgtgagctcaacctggtgctgtccgtgcgcgaggtgcggcaactcacgctccggaaactgcaggagctgtcctcaaaggcggatgaggccagcgagctggcatgccccacgcccaaggaggatggtctggcccagcagcagactcagctgaacctgcgctccctgctggtgaacccggagggccccaccctgatgcggctcaactccgtgcagagctcggagcggcccctgttcctggtgcacccaatcgagggctccaccaccgtgttccacagcctggcctcccggctcagcatccccacctatggcctgcagtgcacccgagctgcgccccttgacagcatccacagcctggctgcctactacatcgactgcatcaggcaggtgcagcccgagggcccctaccgcgtggccggctactcctacggggcctgcgtggcctttgaaatgtgctcccagctgcaggcccagcagagcccagcccccacccacaacagcctcttcctgttcgacggctcgcccacctacgtactggcctacacccagagctaccgggcaaagctgaccccaggctgtgaggctgaggctgagacggaggccatatgcttcttcgtgcagcagttcacggacatggagcacaacagggtgctggaggcgctgctgccgctgaagggcctagaggagcgtgtggcagccgccgtggacctgatcatcaagagccaccagggcctggaccgccaggagctgagctttgcggcccggtccttctactacaagctgcgtgccgctgagcagtacacacccaaggccaagtaccatggcaacgtgatgctactgcgcgccaagacgggtggcgcctacggcgaggacctgggcgcggactacaacctctcccaggtatgcgacgggaaagtatccgtccacgtcatcgagggtgaccaccgcacgctgctggagggcagcggcctggagtccatcatcagcatcatccacagctccctggctgagccacgcgtgagcgtgcgggagggctaggcccgtgcccccgcctgccaccggaggtcactccaccatccccaccccaccccaccccacccccgccatgcaacgggattgaagggtcctgccggtgggaccctgtccggcccagtgccactgccccccgaggctgctagatgtaggtgttaggcatgtcccacccacccgccgcctcccacggcacctcggggacaccagagctgccgacttggagactcctggtctgtgaagagccggtggtgcccgtgcccgcaggaactgggctgggcctcgtgcgcccgtggggtctgcgcttggtctttctgtgcttggatttgcatatttattgcattgctggtagagacccccaggcctgtccaccctgccaagactcctcaggcagcgtgtgggtcccgcactctgcccccatttccccgatgtcccctgcgggcgcgggcagccacccaagcctgctggctgcggccccctctcggccaggcattggctcagcccgctgagtggggggtcgtgggccagtccccgaggagctgggcccctgcacaggcacacagggcccggccacacccagcggccccccgcacagccacccgtggggtgctgcccttatgcccggcgccgggcaccaactccatgtttggtgtttgtctgtgtttgtttttcaagaaatgattcaaattgctgcttggattttgaaatttactgtaactgtcagtgtacacgtctggaccccgtttcatttttacaccaatttggtaaaaatgctgctctcagcctcccacaattaaaccgcatgtgatctccaaaaaaaaaaaaaaaaaaaaaaaa

SEQ ID NO: 37 - DNA, 4400 bp, Human
agccgatgggggcggggaaaagtccggctgggccgggacaaaagccggatcccgggaagctaccggctgctggggtgctccggattttgcggggttcgtcgggcctgtggaagaagcgccgcgcacggacttcggcagaggtagagcaggtctctctgcagccatgtcggccaaggcaatttcagagcagacgggcaaagaactcctttacaagttcatctgtaccacctcagccatccagaatcggttcaagtatgctcgggtcactcctgacacagactgggcccgcttgctgcaggaccacccctggctgctcagccagaacttggtagtcaagccagaccagctgatcaaacgtcgtggaaaacttggtctcgttggggtcaacctcactctggatggggtcaagtcctggctgaagccacggctgggacaggaagccacagttggcaaggccacaggcttcctcaagaactttctgatcgagcccttcgtcccccacagtcaggctgaggagttctatgtctgcatctatgccacccgagaaggggactacgtcctgttccaccacgaggggggtgtggacgtgggtgatgtggacgccaaggcccagaagctgcttgttggcgtggatgagaaactgaatcctgaggacatcaaaaaacacctgttggtccacgcccctgaagacaagaaagaaattctggccagttttatctccggcctcttcaatttctacgaggacttgtacttcacctacctcgagatcaatccccttgtagtgaccaaagatggagtctatgtccttgacttggcggccaaggtggacgccactgccgactacatctgcaaagtgaagtggggtgacatcgagttccctccccccttcgggcgggaggcatatccagaggaagcctacattgcagacctcgatgccaaaagtggggcaagcctgaagctgaccttgctgaaccccaaagggaggatctggaccatggtggccgggggtggcgcctctgtcgtgtacagcgataccatctgtgatctagggggtgtcaacgagctggcaaactatggggagtactcaggcgcccccagcgagcagcagacctatgactatgccaagactatcctctccctcatgacccgagagaagcacccagatggcaagatcctcatcattggaggcagcatcgcaaacttcaccaacgtggctgccacgttcaagggcatcgtgagagcaattcgagattaccagggccccctgaaggagcacgaagtcacaatctttgtccgaagaggtggccccaactatcaggagggcttacgggtgatgggagaagtcgggaagaccactgggatccccatccatgtctttggcacagagactcacatgacggccattgtgggcatggccctgggccaccggcccatccccaaccagccacccacagcggcccacactgcaaacttcctcctcaacgccagcgggagcacatcgacgccagcccccagcaggacagcatctttttctgagtccagggccgatgaggtggcgcctgcaaagaaggccaagcctgccatgccacaagattcagtcccaagtccaagatccctgcaaggaaagagcaccaccctcttcagccgccacaccaaggccattgtgtggggcatgcagacccgggccgtgcaaggcatgctggactttgactatgtctgctcccgagacgagccctcagtggctgccatggtctaccctttcactggggaccacaagcagaagttttactgggggcacaaagagatcctgatccctgtcttcaagaacatggctgatgccatgaggaagcatccggaggtagatgtgctcatcaactttgcctctctccgctctgcctatgacagcaccatggagaccatgaactatgcccagatccggaccatcgccatcatagctgaaggcatccctgaggccctcacgagaaagctgatcaagaaggcggaccagaagggagtgaccatcatcggacctgccactgttggaggcatcaagcctgggtgctttaagattggcaacacaggtgggatgctggacaacatcctggcctccaaactgtaccgcccaggcagcgtggcctatgtctcacgttccggaggcatgtccaacgagctcaacaatatcatctctcggaccacggatggcgtctatgagggcgtggccattggtggggacaggtacccgggctccacattcatggatcatgtgttacgctatcaggacactccaggagtcaaaatgattgtggttcttggagagattgggggcactgaggaatataagatttgccggggcatcaaggagggccgcctcactaagcccatcgtctgctggtgcatcgggacgtgtgccaccatgttctcctctgaggtccagtttggccatgctggagcttgtgccaaccaggcttctgaaactgcagtagccaagaaccaggctttgaaggaagcaggagtgtttgtgccccggagctttgatgagcttggagagatcatccagtctgtatacgaagatctcgtggccaatggagtcattgtacctgcccaggaggtgccgcccccaaccgtgcccatggactactcctgggccagggagcttggtttgatccgcaaacctgcctcgttcatgaccagcatctgcgatgagcgaggacaggagctcatctacgcgggcatgcccatcactgaggtcttcaaggaagagatgggcattggcggggtcctcggcctcctctggttccagaaaaggttgcctaagtactcttgccagttcattgagatgtgtctgatggtgacagctgatcacgggccagccgtctctggagcccacaacaccatcatttgtgcgcgagctgggaaagacctggtctccagcctcacctcggggctgctcaccatcggggatcggtttgggggtgccttggatgcagcagccaagatgttcagtaaagcctttgacagtggcattatccccatggagtttgtgaacaagatgaagaaggaagggaagctgatcatgggcattggtcaccgagtgaagtcgataaacaacccagacatgcgagtgcagatcctcaaagattacgtcaggcagcacttccctgccactcctctgctcgattatgcactggaagtagagaagattaccacctcgaagaagccaaatcttatcctgaatgtagatggtctcatcggagtcgcatttgtagacatgcttagaaactgtgggtcctttactcgggaggaagctgatgaatatattgacattggagccctcaatggcatctttgtgctgggaaggagtatggggttcattggacactatcttgatcagaagaggctgaagcaggggctgtatcgtcatccgtgggatgatatttcatatgttcttccggaacacatgagcatgtaacagagccaggaaccctactgcagtaaactgaagacaagatctcttcccccaagaaaaagtgtacagacagctggcagtggagcctgctttatttagcaggggcctggaatgtaaacagccactggggtacaggcaccgaagaccaacatccacaggctaacaccccttcagtccacacaaagaagcttcatattttttttataagcatagaaataaaaaccaagccaatatttgtgactttgctctgctacctgctgtatttattatatggaagcatctaagtactgtcaggatggggtcttcctcattgtagggcgttaggatgttgctttctttttccattagttaaacatttttttctcctttggaggaagggaatgaaacatttatggcctcaagatactatacatttaaagcaccccaatgtctctctttttttttttttacttccctttcttcttccttatataacatgaagaacattgtattaatctgatttttaaagatctttttgtatgttacgtgttaagggcttgtttggtatcccactgaaatgttctgtgttgcagaccagagtctgtttatgtcagggggatggggccattgcatccttagccattgtcacaaaatatgtggagtagtaacttaatatgtaaagttgtaacatacatacatttaaaatggaaatgcagaaagctgtgaaatgtcttgtgtcttatgttctctgtatttatgcagctgatttgtctgtctgtaactgaagtgtgggtccaaggactcctaactactttgcatctgtaatccacaaagattctgggcagctgccacctcagtctcttctctgtattatcatagtctggtttaaataaactatatagtaacaaaaaaaaaaaaaaaaaaaaaaaaaaaaaaaaaaaaaaaaaaaaaaaaa

SEQ ID NO: 38 - DNA, 2500 bp, Human
cccaggcgcagccaatgggaagggtcggaggcatggcacagccaatgggaagggccggggcaccaaagccaatgggaagggccgggagcgcgcggcgcgggagatttaaaggctgctggagtgaggggtcgcccgtgcaccctgtcccagccgtcctgtcctggctgctcgctctgcttcgctgcgcctccactatgctctccctccgtgtcccgctcgcgcccatcacggacccgcagcagctgcagctctcgccgctgaaggggctcagcttggtcgacaaggagaacacgccgccggccctgagcgggacccgcgtcctggccagcaagaccgcgaggaggatcttccaggagcccacggagccgaaaactaaagcagctgcccccggcgtggaggatgagccgctgctgagagaaaacccccgccgctttgtcatcttccccatcgagtaccatgatatctggcagatgtataagaaggcagaggcttccttttggaccgccgaggaggttgacctctccaaggacattcagcactgggaatccctgaaacccgaggagagatattttatatcccatgttctggctttctttgcagcaagcgatggcatagtaaatgaaaacttggtggagcgatttagccaagaagttcagattacagaagcccgctgtttctatggcttccaaattgccatggaaaacatacattctgaaatgtatagtcttcttattgacacttacataaaagatcccaaagaaagggaatttctcttcaatgccattgaaacgatgccttgtgtcaagaagaaggcagactgggccttgcgctggattggggacaaagaggctacctatggtgaacgtgttgtagcctttgctgcagtggaaggcattttcttttccggttcttttgcgtcgatattctggctcaagaaacgaggactgatgcctggcctcacattttctaatgaacttattagcagagatgagggtttacactgtgattttgcttgcctgatgttcaaacacctggtacacaaaccatcggaggagagagtaagagaaataattatcaatgctgttcggatagaacaggagttcctcactgaggccttgcctgtgaagctcattgggatgaattgcactctaatgaagcaatacattgagtttgtggcagacagacttatgctggaactgggttttagcaaggttttcagagtagagaacccatttgactttatggagaatatttcactggaaggaaagactaacttctttgagaagagagtaggcgagtatcagaggatgggagtgatgtcaagtccaacagagaattcttttaccttggatgctgacttctaaatgaactgaagatgtgcccttacttggctgattttttttttccatctcataagaaaaatcagctgaagtgttaccaactagccacaccatgaattgtccgtaatgttcattaacagcatctttaaaactgtgtagctacctcacaaccagtcctgtctgtttatagtgctggtagtatcaccttttgccagaaggcctggctggctgtgacttaccatagcagtgacaatggcagtcttggctttaaagtgaggggtgaccctttagtgagcttagcacagcgggattaaacagtcctttaaccagcacagccagttaaaagatgcagcctcactgcttcaacgcagattttaatgtttacttaaatataaacctggcactttacaaacaaataaacattgttttgtactcacggcggcgataatagcttgatttatttggtttctacaccaaatacattctcctgaccactaatgggagccaattcacaattcactaagtgactaaagtaagttaaacttgtgtagactaagcatgtaatttttaagttttattttaatgaattaaaatatttgttaaccaactttaaagtcagtcctgtgtatacctagatattagtcagttggtgccagatagaagacaggttgtgtttttatcctgtggcttgtgtagtgtcctgggattctctgccccctctgagtagagtgttgtgggataaaggaatctctcagggcaaggagcttcttaagttaaatcactagaaatttaggggtgatctgggccttcatatgtgtgagaagccgtttcattttatttctcactgtattttcctcaacgtctggttgatgagaaaaaattcttgaagagttttcatatgtgggagctaaggtagtattgtaaaatttcaagtcatccttaaacaaaatgatccacctaagatcttgcccctgttaagtggtgaaatcaactagaggtggttcctacaagttgttcattctagttttgtttggtgtaagtaggttgtgtgagttaattcatttatatttactatgtctgttaaatcagaaattttttattatctatgttcttctagattttacctgtagttcataaaaaaaaaaaaaaaaaaaaaaaaa

SEQ ID NO: 39 - DNA, 4955 bp, Human
ggctggccgaagttaggcggagccccgaggcgggggaggcggggccgggccggcgcagggagagtcactcaatggacaggcgagaaagcaggaccggcgcggcggggcggggccggccgagtccctagagctgggggcggggcggacccagcggaccagcggaccacctgggtgctgtcgtagttggaggtggcctgaggagctcagttccctcagcgcccgtagcttcggcggagtctgcgcgatgggcgacccggaaaggccggaagcggccgggctggatcaggatgagagatcatcttcagacaccaacgaaagtgaaataaagtcaaatgaagagccactcctaagaaagagttctcgccggtttgtcatctttccaatccagtaccctgatatttggaaaatgtataaacaggcacaggcttccttctggacagcagaagaggtcgacttatcaaaggatctccctcactggaacaagcttaaagcagatgagaagtacttcatctctcacatcttagccttttttgcagccagtgatggaattgtaaatgaaaatttggtggagcgctttagtcaggaggtgcaggttccagaggctcgctgtttctatggctttcaaattctcatcgagaatgttcactcagagatgtacagtttgctgatagacacttacatcagagatcccaagaaaagggaatttttatttaatgcaattgaaaccatgccctatgttaagaaaaaagcagattgggccttgcgatggatagcagatagaaaatctacttttggggaaagagtggtggcctttgctgctgtagaaggagttttcttctcaggatcttttgctgctatattctggctaaagaagagaggtcttatgccaggactcactttttccaatgaactcatcagcagagatgaaggacttcactgtgactttgcttgcctgatgttccaatacttagtaaataagccttcagaagaaagggtcagggagatcattgttgatgctgtcaaaattgagcaggagtttttaacagaagccttgccagttggcctcattggaatgaattgcattttgatgaaacagtacattgagtttgtagctgacagattacttgtggaacttggattctcaaaggtttttcaggcagaaaatccttttgattttatggaaaacatttctttagaaggaaaaacaaatttctttgagaaacgagtttcagagtatcagcgttttgcagttatggcagaaaccacagataacgtcttcaccttggatgcagatttttaaaaaacctctcgttttaaaactctataaacttgtcattggtaaatagtagtctattttcctctgcttaaaaaaaattttaagtatatcctttaaaggactgggggtttgctcaaaaggaaatccaaaacctattctaaacaatttgcatttatataattttcctgtttaacaacaagagtgtgacctaaatgcttttgtcttgtcactgaaataaaagatggcattatgtggttaagagcatggggcgaggggtcagacatgagtctaaggttctgcccttactccagtgtgtgacccttggcaagtcagttaatcttggtaaacctcggtgtacttatctttaaaatgggagtaatagtaggtcctaaattcatagagtggatattaggattaggatgcaaaaataaatgcttaaccaacactactactgttagcaccactactaattatcattcattgataatattaattgcaatgatgttgtaataaaatactctcatttccttaaaataattgtgattctaggtcctaggatctagaattagatctttgtatttttaatgcttaggggaagaatataagtatctccttaaaaagaacataattctcattcacgcaagaataagttctttgaattccttagtatgtagtgaagaaaatttagttgttagttgctttgggaagcctacttatggagtggaaaccaggaggttatcatggtagttgaccttataagaaaaatgattcttcttcagaaattaaaaacataactattgccagatttagctctggaatgtttagaatcaggctagaatagcattttccaaagaatattctaagagctattagctcctctagatatttttttgggggaaaaaggggattctgtggtcagatgagtttgggaaatgctgaacacttcattcttctttagcaagtacagtcagtacatcaaagactgagcagttcagtggtacataaatttatctcgccctgcatattcccaacatacttaacacagatgttttttacctgttaacatctcacccagctagtgttcctcagaacaaagattggaaaaagctggccgagaaccatttatacatagaggaagggcttatggactgagaaagggagaacatggtagggattattgaatcatttcaaatttataccagcctgaatagtgtaccagcaattgacttaggctgtgtttctttatggttttaaaactcttgagctgttataagagatagttcttttaatgtgactatgcaacatgatagccaatggtgagggaaaaggaggtttctctagaagagtctgatgaaaggccgggaaccaaggtttttgagaagtctgcccctatttatttttagtaagtatcaagaggtagcctgagcctagttagagttagacctgtctttggatgaagaagtcttaatactgaaatactgaatttttaatacattattatttggtattctgtataccccttcaagcagttgtttcccattcccaacaaactgtactttatacaattctggatgctaaaacttagagattttctctttgcataaattttggctccattctttccataacaatctaatcaaaactgggagttctcaagtgaatgcaaaaggagcaggccataactttatttgttagatacactgtcagaaacttgagatcttttggcctatgataataccattaatttttgcattgcttcagtttgccaagtgtttttacatcatctcatttgatctcaaaacagcttgacagagcaactgttattgaaatattacagatggaaagaatgaggctcagggaagttaaatgacttggccaagatctgctcatcgtcactgtctgtacagtatttttttttagaggttgtaatgtctcagatttagtcctttaccatctatgttgatttgcttttgtctatttcctcattaattgaatatactttaaatatatatattaaagtatcaaaatatagagagacatttgaactgtattcaggtaatatgtttaaagatatttatatattgccatacaaaaacttaacatttaaaactgataatatctgtaatgacatcagaatgaaagaaaaaaaattgtacagtgtatattcctttgttttgaatccaaatctttttcataggtaatgacagatgccttaatgtgaagcttatttataatagcaataaacctaactggatttggatgaagaagtcttaatactgacatactggatttttaatgcactggtttgttatttggtattctatctctttttccaggcctccaggttgcacatttatttattatgttcaatactttggttcttagttcttaaagaatcaagaagttgtgtaatcttttaaaaatattatcttgcagataaagaaaaaaattaagagtgtgtttacaactgttttctcttttttacagtacatgtatttaaatcattgctataataaagttaagttcattaggaatataaaaacttgcagttctatgatagattgcatttattaaaaatgtttcattgtatcacatagaaatatggccaggaaggacttgagaagacagtttgatccattgcttttagacaggactgggttttgctgtccaattatatacaataatagtttttcttacaactaagctggccccagccttgtcttgatattaatacatgaaatttttataattgtctcattgtctcatttagaaacatccatatttttctgctttttctattgccattttttatttgtgcatgaattgattattgagaaaatgtagcagtttgcatatttaaaaattaatcattttgcattttacatttaaatatgctaacatcactgtcatagaattcccaaatttcatttgtagatactgaactaagggctaatgtcaggagctgatttttaatgataaagctgcagatgggctaaataaaagccaaattaatcctacaatcaggtattatgtttttaaaccaagttgagtgaattggtagtggacttgggaaatcttccccagcagaatctggatgaatggcacagaattgaaatctctttgtttcccaccatttccctttaagtgctctgctcctttgtaaaaagttaaagatttgaaagagaatctcatattcccgaggcattaggaagaaaggatttaatcccttcaatttggggcttaatcttgtttaaaaaaatgtaagtgaagatggaaggctggagagaatgattgctttttgtacagttaaataaggtcacaatattcttacatactttgttttacaactgtgttttcattttttcaaatgtctggccatttagcaaagttatttactatttactgtgtacatagaaagctttattatgtgtggtgtatctaaattttttttgctgaaatacattatggtcaatcaagccaagcctgcatgtacagaatttgtttttttttcaaataaattagttgttttcttatttttttggcttagtatgttgaaataaactatggtatcttcatcattttgtacatttcctttttgaggaaggtttctttataagtgcaagggctaccctaataaaggaatgtatatacttaaaaaaaaaaaaaaaaaaaaaaaaaa

SEQ ID NO: 40 - DNA, 2758 bp, Human
ctatccgcgcgcgtcgccggcccagtcctgtcgctgacgggaggatctgaagccggccgcaggtcaaagagtaaaatgaagtacattctggttactggtggtgttatatcaggaattggaaaaggaatcattgccagcagtgtgggcacaatactcaagtcatgtggtttacatgtaacttcaatcaaaattgacccctacattaacattgatgcaggaacattctctccttatgagcatggtgaggtttttgtgctggatgatggtggggaagtagaccttgacctgggtaactatgagcggttccttgacatccgcctcaccaaggacaataatctgaccactggaaagatataccagtatgtcattaacaaggaacggaaaggagattacttggggaaaactgtccaagttgtccctcatatcacagatgcaatccaggagtgggtgatgagacaggcgttaatacctgtagatgaagatggcctggaacctcaagtgtgtgttattgagcttggtggaaccgtgggggacatagaaagcatgccctttattgaggccttccgtcagttccaattcaaggtcaaaagagagaacttttgtaacatccacgtcagtctagttccccagccaagttcaacaggggaacagaagactaaacctacccagaatagtgttcgggaacttagaggacttgggctttccccagatctggttgtatgcaggtgctcaaatccacttgacacatcagtgaaggagaaaatatcaatgttctgccatgttgagcctgaacaagtgatctgtgtccacgatgtctcatccatctaccgagtccccttgttgttagaggagcaaggggttgtagattattttcttcgaagacttgaccttcctattgagaggcagccaagaaaaatgctgatgaaatggaaagagatggctgacagatatgatcgcttgctggagacctgctctattgcccttgtggcgaaatacaccgagttctcagactcctatgcctctgtcattaaggctctggagcattctgcactggccatcaaccacaaattggaaatcaagtacatagattctgcggacttggagcccatcacctcgcaagaagagcccgtgcgctaccacgaagcttggcagaagctctgtagtgctcatggagtgctggttccaggaggatttggtgttcgaggaacagaaggaaaaatccaagcaattgcctgggctcggaatcagaaaaagccttttttgggcgtgtgcttagggatgcagttggcagtggttgaattctcaagaaacgtgctgggatggcaagatgccaattctacagagtttgaccctacgaccagtcatcccgtggtcgtagacatgccagaacacaacccagggcagatgggcggaaccatgaggctgggcaagaggagaaccctgttccagaccaagaactcagtcatgaggaaactctatggagacgcagactacttggaagagaggcaccgccaccgatttgaggtgaatccagtctggaaaaagtgtttggaagaacaaggcttgaagtttgttggccaagatgttgaaggagagagaatggaaattgtggagttagaagatcatcccttttttgttggggttcagtaccaccctgagttcctgtccaggcctatcaagccctccccaccatactttggcctcctcctggcctctgtggggcggctctcacattacctccagaaaggctgcaggctctcacccagggacacctatagtgacaggagtggaagcagctcccctgactctgaaatcaccgaactgaagtttccatcaataaatcatgactgatcttgtagcggatgattcttcaagagacccttcaaacttgggtagagtttacagctctgactttacactcggctttggagactttctttaaattatgtttttattaagattattttattatgcggaaaggtatttgggaaacttgtcacttgcatgtcccatcacgtgtactggctcctctgtggtgtctgcctgttgcgtgacactctccttgcagttcttgagttgcggcagaacatcgcgatgggaaccgatggtgggtggggctgcagatgtccccatcggtcaccttgtttctcaactacctcgcatcattgcagatcgtagcgcgttgcctgtcgctttcccttggatacctagaccgttataaagtgtgccacatggacttaccgagcatggagagaggattttagctaggatttgaacacttggtgctgggaacctcagggtattgcttgccactaagccatgaaaccagagacaaaatctctatactgccctgagttggggggaattctcagtgccaactgtggctggtcctcattcaaagggacggtcagtttggtgtcaacatgaaacaccaagatgtctgtctctgaagcgtgattttaaaatccccatgcctgtgcgtgcgcttcctatttctagggctgggaaacactccttgcatcaaggggtcacttacagaacaaagaatcttttgggggaaacttcctctaaaaccctctcatatatagacagctttgactggagggtccatttttcttccaggatggtgttactgcagttgaagggcaatatgaagttactttcttaatgtgacctagcaataggcatagctacgtggcactatattctggccagactcgatgtgtactctaacttaagaaataaatcagtaaggcag

SEQ ID NO: 41 - DNA, 1712 bp, Human
cgaaatcggctggtttatattggcgcggcccagacggcagaggtctctgcggcgcggtcctcggagacacgcggcggtgtcctgtgttggccatggccgactacctgattagtgggggcacgtcctacgtgccagacgacggactcacagcacagcagctcttcaactgcggagacggcctcacctacaatgactttctcattctccctgggtacatcgacttcactgcagaccaggtggacctgacttctgctctgaccaagaaaatcactcttaagaccccactggtttcctctcccatggacacagtcacagaggctgggatggccatagcaatggcgcttacaggcggtattggcttcatccaccacaactgtacacctgaattccaggccaatgaagttcggaaagtgaagaaatatgaacagggattcatcacagaccctgtggtcctcagccccaaggatcgcgtgcgggatgtttttgaggccaaggcccggcatggtttctgcggtatcccaatcacagacacaggccggatggggagccgcttggtgggcatcatctcctccagggacattgattttctcaaagaggaggaacatgactgtttcttggaagagataatgacaaagagggaagacttggtggtagcccctgcaggcatcacactgaaggaggcaaatgaaattctgcagcgcagcaagaagggaaagttgcccattgtaaatgaagatgatgagcttgtggccatcattgcccggacagacctgaagaagaatcgggactacccactagcctccaaagatgccaagaaacagctgctgtgtggggcagccattggcactcatgaggatgacaagtataggctggacttgctcgcccaggctggtgtggatgtagtggttttggactcttcccagggaaattccatcttccagatcaatatgatcaagtacatcaaagacaaataccctaatctccaagtcattggaggcaatgtggtcactgctgcccaggccaagaacctcattgatgcaggtgtggatgccctgcgggtgggcatgggaagtggctccatctgcattacgcaggaagtgctggcctgtgggcggccccaagcaacagcagtgtacaaggtgtcagagtatgcacggcgctttggtgttccggtcattgctgatggaggaatccaaaatgtgggtcatattgcgaaagccttggcccttggggcctccacagtcatgatgggctctctcctggctgccaccactgaggcccctggtgaatacttcttttccgatgggatccggctaaagaaatatcgcggtatgggttctctcgatgccatggacaagcacctcagcagccagaacagatatttcagtgaagctgacaaaatcaaagtggcccagggagtgtctggtgctgtgcaggacaaagggtcaatccacaaatttgtcccttacctgattgctggcatccaacactcatgccaggacattggtgccaagagcttgacccaagtccgagccatgatgtactctggggagcttaagtttgagaagagaacgtcctcagcccaggtggaaggtggcgtccatagcctccattcgtatgagaagcggcttttctgaaaagggatccagcacacctcctcggtttttttttcaataaaagtttagaaagaaaaaaaaaaaaaaaaaaaaaaa

SEQ ID NO: 42 - DNA, 2460 bp, Human
aaagtcaaaccccgacaccgcggcgggccggtgagctcactagctgacccggcaggtcaggatctggcttagcggcgccgcgagctccagtgcgcgcacccgtggccgcctcccagccctctttgccggacgagctctgggccgccacaagactaaggaatggccaccccgcccaagagaagctgcccgtctttctcagccagctctgaggggacccgcatcaagaaaatctccatcgaagggaacatcgctgcagggaagtcaacatttgtgaatatccttaaacaattgtgtgaagattgggaagtggttcctgaacctgttgccagatggtgcaatgttcaaagtactcaagatgaatttgaggaacttacaatgtctcagaaaaatggtgggaatgttcttcagatgatgtatgagaaacctgaacgatggtcttttaccttccaaacatatgcctgtctcagtcgaataagagctcagcttgcctctctgaatggcaagctcaaagatgcagagaaacctgtattattttttgaacgatctgtgtatagtgacaggtatatttttgcatctaatttgtatgaatctgaatgcatgaatgagacagagtggacaatttatcaagactggcatgactggatgaataaccaatttggccaaagccttgaattggatggaatcatttatcttcaagccactccagagacatgcttacatagaatatatttacggggaagaaatgaagagcaaggcattcctcttgaatatttagagaagcttcattataaacatgaaagctggctcctgcataggacactgaaaaccaacttcgattatcttcaagaggtgcctatcttaacactggatgttaatgaagactttaaagacaaatatgaaagtctggttgaaaaggtcaaagagtttttgagtactttgtgatcttgctgaagactacaggcagccaaatggttccagatacttcagctttgtgtatcttcgtaacttcatattaatataagtttctttagaaaacccaagtttttaatcgtttttgttttaaggaaaaaagatttttaaaatgaatcttatgcaaaactttttgatcagtttcttttcttttgttttttttttaaaaaagacatttaaagacaaagacattatttctcatagcaggaaatgtagaggtagatggttccagtatcagcatagtgactaaactacattataaaagatccagcttccttctgtcattcccctcttttgtcttcctcagcaggttggcttttttccctggtgcctctcacttcgttggtgaccagtttcttaaactgaaagctttaatgttacatagtaaatggtagtgtgtcctgtgtaaattagtgtacctattaaaagttgcaaagtggaattaaaggaatccctagaataaggattctgaagttttattttaaattattatcttcttaacagtttagtcccacctcttacttcctgcctcagtctgctttctctactgtctggattaattaggcagcctgctataaagttaaagtcacacatttctattttgcaaacactgtgattactctttgctttgtagtttgctttgctttgtagggttctgcttttaagtttttctctttttcagacaaattactgataaaaatgatattgctctatatgtaatatatcctgaaagcattattttttgttgaataggaaataaaattaatgaagacagaggctagaaagcatccattaattaatgagacacacttaactacttatctctaaaccatctatgtgaatatttgtaaaaataatgaatggactcatcttagttctgtatataaatatattttctttctagtttgtttagttaaggtgtgcagtgtttttcctgtgtattaaacctttccattttacgttttagaaaattttatgtattttaaaataaggggaagagtcattttcacctttaaactactatttttctttccaagtcatttttgtttttggtttcttattcaaagatgataatttagtggattaaccagtccagacgcactgatctttgcaaaggagacttaatttcaaatctgtaattaccatacataaactgtctcattatacgtatgcatttttttagtttgtttttgtttggtataaattaatttgttaattaaatatttcttaagtataaaccttatgaactacagtggagctacactcattgaaatgtaatttcagttctaaaaagatgtaataatcattttagaattaaaatttattctacttttaaataaattatgaatattaaaggtgaaaattgtataaattactttgattccattttaagtggagacatatttcagtgatttttagtaacctttaaaaatgtataatgacttttaaaatttgtagaattgaaaagacgctaataaaaatttattattt

SEQ ID NO: 43 - DNA, 1420 bp, Human
cttactgcgggacggccttggagagtactcgggttcgtgaacttcccggaggcgcaatgagctgcattaacctgcccactgtgctgcccggctcccccagcaagacccgggggcagatccaggtgattctcgggccgatgttctcaggaaaaagcacagagttgatgagacgcgtccgtcgcttccagattgctcagtacaagtgcctggtgatcaagtatgccaaagacactcgctacagcagcagcttctgcacacatgaccggaacaccatggaggcgctgcccgcctgcctgctccgagacgtggcccaggaggccctgggcgtggctgtcataggcatcgacgaggggcagtttttccctgacatcatggagttctgcgaggccatggccaacgccgggaagaccgtaattgtggctgcactggatgggaccttccagaggaagccatttggggccatcctgaacctggtgccgctggccgagagcgtggtgaagctgacggcggtgtgcatggagtgcttccgggaagccgcctataccaagaggctcggcacagagaaggaggtcgaggtgattgggggagcagacaagtaccactccgtgtgtcggctctgctacttcaagaaggcctcaggccagcctgccgggccggacaacaaagagaactgcccagtgccaggaaagccaggggaagccgtggctgccaggaagctctttgccccacagcagattctgcaatgcagccctgccaactgagggacctgcaagggccgcccgctcccttcctgccactgccgcctactggacgctgccctgcatgctgcccagccactccaggaggaagtcgggaggcgtggagggtgaccacaccttggccttctgggaactctcctttgtgtggctgccccacctgccgcatgctccctcctctcctacccactggtctgcttaaagcttccctctcagctgctgggacgatcgcccaggctggagctggccccgcttggtggcctgggatctggcacactccctctccttggggtgagggacagagccccacgctgttgacatcagcctgcttcttcccctctgcggctttcactgctgagtttctgttctccctgggaagcctgtgccagcacctttgagccttggcccacactgaggcttaggcctctctgcctgggatgggctcccaccctcccctgaggatggcctggattcacgccctcttgtttccttttgggctcaaagcccttcctacctctggtgatggtttccacaggaacaacagcatctttcaccaagatgggtggcaccaaccttgctgggacttggatcccaggggcttatctcttcaagtgtggagagggcagggtccacgcctctgctgtagcttatgaaattaactaatt

SEQ ID NO: 44 - DNA, 3675 bp, Human
ggaataagtgacatcatgagtgtgtgccaggtgtctgattacagaaggtgttcaattaatctgcaatcattaattaacccttcagtcgctggtattatttgccatccatcctccgagtgttgccaagttatgggtgcgttctgccagcgtcctagcagtggtaaggcttctggctgccagcggcgaacctctcccttcgagtatttctcctcttgctgagatgaaatgcgaccgggtctctttaagggccaggcgccgggatccaggcggcgcccaacggctggactagcagtcgtccgcgccgactcgcacaagaaggaaccccgggcctctggatccgctcgcccggctatgctgctgtggccgctgcggggctgggccgcccgggcgctgcgctgctttgggccgggaagtcgcgggagcccggcctcaggccccgggccgcggagggtgcagcgccgggcctggcctcccgataaagaacaggaaaaagagaaaaaatcagtgatctgtgtcgagggcaatattgcaagtgggaagacgacatgcctggaattcttctccaacgcgacagacgtcgaggtgttaacggagcctgtgtccaagtggagaaatgtccgtggccacaatcctctgggcctgatgtaccacgatgcctctcgctggggtcttacgctacagacttatgtgcagctcaccatgctggacaggcatactcgtcctcaggtgtcatctgtacggttgatggagaggtcgattcacagcgcaagatacatttttgtagaaaacctgtatagaagtgggaagatgccagaagtggactatgtagttctgtcggaatggtttgactggatcttgaggaacatggacgtgtctgttgatttgatagtttaccttcggaccaatcctgagacttgttaccagaggttaaagaagagatgcagggaagaggagaaggtcattccgctggaatacctggaagcaattcaccatctccatgaggagtggctcatcaaaggcagccttttccccatggcagcccctgttctggtgattgaggctgaccaccacatggagaggatgttagaactctttgaacaaaatcgggatcgaatattaactccagagaatcggaagcattgcccataggaggcaaaaggtctatggctcatgtctgaaaaatgcctgctgctgccaagttagctattgggagcaatctggaaaaacttgctcccaggagggctttgtgtctggccagcttgattttcctaatggtctcatctcctttgctagtgtctttgtcatgcgtctctggccctcgtgggtaaatgacaaacgggaccaatgggtttgccaagccctttgctgttcgcagcctcacattcccccggtgcctctcccatggctttgtgctgctgagtcgctctcatgaagcccttagggagagcacctgttgtgtgcctgacaccacgctggagctgtgtaccaatcgtctcagccttcattaggaggccgaggtaggagtcttatatcccaggtgaggaatttgaagctcagaaaggttgaggggctccccagaggtcacacagcctgtgtgcagtggagctggcaccattcagactttcagccgactcagcaactttcccttgccctgggctgcctcctcctgagagctgttccccaccgccctgcctcttccggttggaggctctcatgtctctttggggagagctggcagtgtgcggagctgataacattttcccaatattgagcagttcccaaggacagtcagcatttctagacttccacaaaattatgctgcatttggctggagcccggtgttcagtggtttccctgcccgaggtcgctgcagccccatctaccacatcttcatgtggacattgagattcacatgctggctcctgaagggtgctcagtctccttggtgattaaggtcctgcttgaactgctgccaactccatgtcagggaagtcgcttttggtgcctggctggtttgcccagagccaagctggggcaaggggcagccagccctggcttccaaggctcccgtactgtctgtgtccttgtataaggagctttgctcttggaattactgaaagtctgtggcccaagagagagacacaagtggccttaagtctttttgaagtgttatttcatccagggaaatgcctcgagccatagagcctgaaatcatctttgttggctcagaaaataccttagcttcactcagctggactgcattgaaggcgaggctgccccttggatcaagcagaaaacaagagaaagaaagaacgttccctttggggatagtctggaaagttgggatttgcaaataaaggctctggaagcattgctggtcctgaagctttggaggtgggcagagagagcttcaagaagactagatgcaaaccctggaaaggattaaggctcaactctggagaaacaggccacagcctctcagagcagctgttggctgtaaatagaggtagcaaggccgctcccaggcccctgtgagtgtgggcacctgtgcatgcaatgctccgactctgcagaggtgccaagtgcccctgctgggccagtcccagagagttaggaagtcaaggcctgcaactcctggttcttcctgtttggaccagttcttgtgccattggcaggatgagaggcagcagccaggcgggagctgtgtctagcagcacctgtagcccacgtgctgctaattagctggaaaactggcgaaggcagaacctttgctaccaggaatcttgacatgtggggtctgtctttgagaatttgtaaatgaacagtccaatatttcctctcggctcattttgcacatccatttttggggaaatgtgatttctctctctttttttttttttttttttgcctaaggcacaatctcaagaggtcctgagaccacgtacccatgatttttttcttgctctgtgatacccaataactccttcacctaagccctgttgttgattttgaagtgcttcctaggccagtgattttagcttctgccagctgcttttgccagtagattaacgtgtttttatttttcaaactccgtgtttcctaacgtggagtgtatgggtctaagagagcctgctgtcctccctgccttccaccttggagaggaggctggacgcatcagcagtggccagggcaggtcgcaaaatctcccagcctagagaccacacctgaaacggctgaagccagcttgcacaagggctgctgtccctctgcggcaggcagagctggtgggggcaggggtcacagagcagtcatagacaccatggaccagggcaggagaagggcagatggcacatgggcacaacagggccttgtccttagagcactggggggtcatggctgggaggggcatggcaggggctggcatccctgtagagccagaggggccacccagggcagtgacattccagatatgttgggctcacctcatccttgctgtgagactggagttccatggggacatgaagtcagtacaccgcagagctgctcagctgctctacctctcgctgacttttttgttgcacatatacattttctttcaattagcatttatttcagcttttatttaagctttttgacagtacatgtaaaatatatgattataaccatttaaaaata

SEQ ID NO: 45 - DNA, 1144 bp, Human
aacggtgcgctggagcgagtgagcagcgatacctagggcggaagtgctctcggcggaagtgatcgctgtgtgaatcgtgggtgggatggccgcgggccgcctctttctaagtcggcttcgagcacccttcagttccatggccaagagcccactcgagggcgtttcctcctccagaggcctgcacgcggggcgcgggccccgaaggctctccatcgaaggcaacattgctgtgggaaagtccacgtttgtgaagttactcacgaaaacttacccagaatggcacgtagctacagaacctgtagcaacatggcagaatatccaggctgctggcacccaaaaagcctgcactgcccaaagtcttggaaacttgctggatatgatgtaccgggagccagcacgatggtcctacacattccagacattttcctttttgagccgcctgaaagtacagctggagcccttccctgagaaactcttacaggccaggaagccagtacagatctttgagaggtctgtgtacagtgacaggtatatctttgcaaagaatctttttgaaaatggttccctcagtgacatcgagtggcatatctatcaggactggcattcttttctcctgtgggagtttgccagccggatcacattacatggcttcatctacctccaggcttctccccaggtttgtttgaagagactgtaccagagggccagggaggaggagaaaggaattgagctggcctatctagagcagctgcatggccaacacgaagcctggcttattcacaagacaacgaagctccactttgaggctctgatgaacattccagtgctggtgttggatgtcaatgatgatttttctgaggaagtaaccaaacaagaagacctcatgagagaggtaaacacctttgtaaagaatctgtaaccaataccatgaagttcaggctgtgatctgggctccctgactttctgaagctagaaaaatgttgtgtctcccaaccacctttccatccccagcccctctcatccctggagcactctgccgctcaagagctggtttgttaattattgttagactttgccattgttttcttttgtacctgaagcattttgaaaataaagtttacttaagttatgcttgtttttctaa

SEQ ID NO: 46 - DNA, 2244 bp, Human
ctgcagacgaggcagggagaggcgggacttcgcgggcgagacgtcatcggggcgccggacgccggggcgcctgggagtttgaagcaaacaggcagcgcgcgacaatggcggtcgctcgtgcagctttggggccattggtgacgggtctgtacgacgtgcaggctttcaagtttggggacttcgtgctgaagagcgggctttcctcccccatctacatcgatctgcggggcatcgtgtctcgaccgcgtcttctgagtcaggttgcagatattttattccaaactgcccaaaatgcaggcatcagttttgacaccgtgtgtggagtgccttatacagctttgccattggctacagttatctgttcaaccaatcaaattccaatgcttattagaaggaaagaaacaaaggattatggaactaagcgtcttgtagaaggaactattaatccaggagaaacctgtttaatcattgaagatgttgtcaccagtggatctagtgttttggaaactgttgaggttcttcagaaggagggcttgaaggtcactgatgccatagtgctgttggacagagagcagggaggcaaggacaagttgcaggcgcacgggatccgcctccactcagtgtgtacattgtccaaaatgctggagattctcgagcagcagaaaaaagttgatgctgagacagttgggagagtgaagaggtttattcaggagaatgtctttgtggcagcgaatcataatggttctcccctttctataaaggaagcacccaaagaactcagcttcggtgcacgtgcagagctgcccaggatccacccagttgcatcgaagcttctcaggcttatgcaaaagaaggagaccaatctgtgtctatctgctgatgtttcactggccagagagctgttgcagctagcagatgctttaggacctagtatctgcatgctgaagactcatgtagatattttgaatgattttactctggatgtgatgaaggagttgataactctggcaaaatgccatgagttcttgatatttgaagaccggaagtttgcagatataggaaacacagtgaaaaagcagtatgaaggaggtatctttaaaatagcttcctgggcagatctagtaaatgctcacgtggtgccaggctcaggagttgtgaaaggcctgcaagaagtgggcctgcctttgcatcgggggtgcctccttattgcggaaatgagctccaccggctccctggccactggggactacactagagcagcggttagaatggctgaggagcactctgaatttgttgttggttttatttctggctcccgagtaagcatgaaaccagaatttcttcacttgactccaggagttcagttggaagcaggaggagataatcttggccaacagtacaatagcccacaagaagttattggcaaacgaggttccgatatcatcattgtaggtcgtggcataatctcagcagctgatcgtctggaagcagcagagatgtacagaaaagctgcttgggaagcgtatttgagtagacttggtgtttgagtgcttcagatacatttttcagatacaatgtgaagacattgaagatatgtggtcctcctgaaagtcactggctggaaataatccaattattcctgcttggattcttccacagggcctgtgtaagaatgggttctggagttctcatggtctttaggaaatattgagtaatttgtaatcaccgcattgatactataataagttcattcttaagcttgctttttttgagactggtgtttgttagacagccacagtcctgtctgggttagggtcttccacatttgaggatccttcctatctctccatgggactagactgctttgttattctatttattttttaatttttttcgagacaggatctcactctgttgcccaggatggagtgcagtggtgagatcacggctcattgcagcctcgacctcccaggtgatcctcccacctcagcttccagattagctggtgctataggcatgcaccaccacgtccatctaaatttctttattatttgtagagatgaggtcttgccatgttacccaggctggtctcaactcctgggctcaagcgatcctcctgcctcagtctctcaaagtgctgggattacaggtgtgagccactgtgcccagcctaattgcagtaagacaaaaattctagggcaccaagaggctaaagtcagcacagcttttcttgtgtcctgtatt

SEQ ID NO: 47 - DNA, 4451 bp, Human
gctccgcccccgcgccgccggccctagtctgcctgttttcgactcgcgctccggctgctgtcacttggctctctggctggagcttgaggacgcaaggagggtttgtcactggcagactcgagactgtaggcactgccatggcccctgtgctcagtaaggactcggcggacatcgagagtatcctggctttaaatcctcgaacacaaactcatgcaactctgtgttccacttcggccaagaaattagacaagaaacattggaaaagaaatcctgataagaactgctttaattgtgagaagctggagaataattttgatgacatcaagcacacgactcttggtgagcgaggagctctccgagaagcaatgagatgcctgaaatgtgcagatgccccgtgtcagaagagctgtccaactaatcttgatattaaatcattcatcacaagtattgcaaacaagaactattatggagctgctaagatgatattttctgacaacccacttggtctgacttgtggaatggtatgtccaacctctgatctttgtgtaggtggatgcaatttatatgccactgaagagggacccattaatattggtggattgcagcaatttgctactgaggtattcaaagcaatgagtatcccacagatcagaaatccttcgctgcctcccccagaaaaaatgtctgaagcctattctgcaaagattgctctttttggtgctgggcctgcaagtataagttgtgcttcctttttggctcgattggggtactctgacatcactatatttgaaaaacaagaatatgttggtggtttaagtacttctgaaattcctcagttccggctgccgtatgatgtagtgaattttgagattgagctaatgaaggaccttggtgtaaagataatttgcggtaaaagcctttcagtgaatgaaatgactcttagcactttgaaagaaaaaggctacaaagctgctttcattggaataggtttgccagaacccaataaagatgccatcttccaaggcctgacgcaggaccaggggttttatacatccaaagactttttgccacttgtagccaaaggcagtaaagcaggaatgtgcgcctgtcactctccattgccatcgatacggggagtcgtgattgtacttggagctggagacactgcctttgactgtgcaacatctgctctacgttgtggagctcgccgtgtgttcatcgtcttcagaaaaggctttgttaatataagagctgtccctgaggagatggaacttgctaaggaagaaaagtgtgaatttctgccattcctgtccccacggaaggttatagtaaaaggtgggagaattgttgctatgcagtttgttcggacagagcaagatgaaactggaaaatggaatgaagatgaagatcagatggtccatctgaaagccgatgtggtcatcagtgcctttggttcagttctgagtgatcctaaagtaaaagaagccttgagccctataaaatttaacagatggggtctcccagaagtagatccagaaactatgcaaactagtgaagcatgggtatttgcaggtggtgatgtcgttggtttggctaacactacagtggaatcggtgaatgatggaaagcaagcttcttggtacattcacaaatacgtacagtcacaatatggagcttccgtttctgccaagcctgaactacccctcttttacactcctattgatctggtggacattagtgtagaaatggccggattgaagtttataaatccttttggtcttgctagcgcaactccagccaccagcacatcaatgattcgaagagcttttgaagctggatggggttttgccctcaccaaaactttctctcttgataaggacattgtgacaaatgtttcccccagaatcatccggggaaccacctctggccccatgtatggccctggacaaagctcctttctgaatattgagctcatcagtgagaaaacggctgcatattggtgtcaaagtgtcactgaactaaaggctgactttccagacaacattgtgattgctagcattatgtgcagttacaataaaaatgactggacggaacttgccaagaagtctgaggattctggagcagatgccctggagttaaatttatcatgtccacatggcatgggagaaagaggaatgggcctggcctgtgggcaggatccagagctggtgcggaacatctgccgctgggttaggcaagctgttcagattcctttttttgccaagctgaccccaaatgtcactgatattgtgagcatcgcaagagctgcaaaggaaggtggtgccaatggcgttacagccaccaacactgtctcaggtctgatgggattaaaatctgatggcacaccttggccagcagtggggattgcaaagcgaactacatatggaggagtgtctgggacagcaatcagacctattgctttgagagctgtgacctccattgctcgtgctctgcctggatttcccattttggctactggtggaattgactctgctgaaagtggtcttcagtttctccatagtggtgcttccgtcctccaggtatgcagtgccattcagaatcaggatttcactgtgatcgaagactactgcactggcctcaaagccctgctttatctgaaaagcattgaagaactacaagactgggatggacagagtccagctactgtgagtcaccagaaagggaaaccagttccacgtatagctgaactcatggacaagaaactgccaagttttggaccttatctggaacagcgcaagaaaatcatagcagaaaacaagattagactgaaagaacaaaatgtagctttttcaccacttaagagaaactgttttatccccaaaaggcctattcctaccatcaaggatgtaataggaaaagcactgcagtaccttggaacatttggtgaattgagcaacgtagagcaagttgtggctatgattgatgaagaaatgtgtatcaactgtggtaaatgctacatgacctgtaatgattctggctaccaggctatacagtttgatccagaaacccacctgcccaccataaccgacacttgtacaggctgtactctgtgtctcagtgtttgccctattgtcgactgcatcaaaatggtttccaggacaacaccttatgaaccaaagagaggcgtacccttatctgtgaatccggtgtgttaaggtgatttgtgaaacagttgctgtgaactttcatgtcacctacatatgctgatcttttaaaatcatgatccttgtgttcagctctttccaaattaaaacaaatatacattttctaaataaaaatatgtaatttcaaaatacatttgtaagtgtaaaaaatgtctcatgtcaatgaccattcaattagtggtcataaaatagaataattcttttctgaggatagtagttaaataactgtgtggcagttaattggatgttcactgccagttgtcttatgtgaaaaattaacttttttgtggcaattagtgtgacagtttccaaattgccctatgctgtgctccatatttgatttctaattgtaagtgaaattaagcattttgaaacaaagtactctttaacatacaagaaaatgtatccaaggaaacattttatcattaaaaattacctttaattttaatgctgtttctaagaaaatgtagttagctccataaagtacaaatgaagaaagtcaaaaaattatttgctatggcaggataagaaagcctaaaattgagtttgtagaactttattaagtaaaatccccttcgctgaaattgcttatttttggtgttggatagaggatagggagaatatttactaactaaataccattcactactcatgcgtgagatgggtgtacaaactcatcctcttttaatggcatttctctttaaactatgttcctaacaaaatgagatgataggatagatcctggttaccactcttttgctgtgcacatacgggctctgactggttttaatagtcaccttcatgattatagcaactaatgtttgaacaaagctcaaagtatgcaatgcttcattattcaagaatgaaaaatataatgttgataatatatattaagtgtgccaaatcagtttgactactctctgttttagtgtttatgtttaaaagaaatatattttttgttattattagataatatttttgtatttctctattttcataatcagtaaatagtgtcatataaactcatttatctcctcttcatggcatcttcaatatgaatctataagtagtaaatcagaaagtaacaatctatggcttatttctatgacaaattcaagagctagaaaaataaaatgtttcattatgcacttttagaaatgcatatttgccacaaaacctgtattactgaataatatcaaataaaatatcataaagcattttaaaaaa

SEQ ID NO: 48 - DNA, 2856 bp, Human
tagtcgcgggtccccgagtgagcacgccagggagcaggagaccaaacgacgggggtcggagtcagagtcgcagtgggagtccccggaccggagcacgagcctgagcgggagagcgccgctcgcacgcccgtcgccacccgcgtacccggcgcagccagagccaccagcgcagcgctgccatggagcccagcagcaagaagctgacgggtcgcctcatgctggctgtgggaggagcagtgcttggctccctgcagtttggctacaacactggagtcatcaatgccccccagaaggtgatcgaggagttctacaaccagacatgggtccaccgctatggggagagcatcctgcccaccacgctcaccacgctctggtccctctcagtggccatcttttctgttgggggcatgattggctccttctctgtgggccttttcgttaaccgctttggccggcggaattcaatgctgatgatgaacctgctggccttcgtgtccgccgtgctcatgggcttctcgaaactgggcaagtcctttgagatgctgatcctgggccgcttcatcatcggtgtgtactgcggcctgaccacaggcttcgtgcccatgtatgtgggtgaagtgtcacccacagcctttcgtggggccctgggcaccctgcaccagctgggcatcgtcgtcggcatcctcatcgcccaggtgttcggcctggactccatcatgggcaacaaggacctgtggcccctgctgctgagcatcatcttcatcccggccctgctgcagtgcatcgtgctgcccttctgccccgagagtccccgcttcctgctcatcaaccgcaacgaggagaaccgggccaagagtgtgctaaagaagctgcgcgggacagctgacgtgacccatgacctgcaggagatgaaggaagagagtcggcagatgatgcgggagaagaaggtcaccatcctggagctgttccgctcccccgcctaccgccagcccatcctcatcgctgtggtgctgcagctgtcccagcagctgtctggcatcaacgctgtcttctattactccacgagcatcttcgagaaggcgggggtgcagcagcctgtgtatgccaccattggctccggtatcgtcaacacggccttcactgtcgtgtcgctgtttgtggtggagcgagcaggccggcggaccctgcacctcataggcctcgctggcatggcgggttgtgccatactcatgaccatcgcgctagcactgctggagcagctaccctggatgtcctatctgagcatcgtggccatctttggctttgtggccttctttgaagtgggtcctggccccatcccatggttcatcgtggctgaactcttcagccagggtccacgtccagctgccattgccgttgcaggcttctccaactggacctcaaatttcattgtgggcatgtgcttccagtatgtggagcaactgtgtggtccctacgtcttcatcatcttcactgtgctcctggttctgttcttcatcttcacctacttcaaagttcctgagactaaaggccggaccttcgatgagatcgcttccggcttccggcaggggggagccagccaaagtgataagacacccgaggagctgttccatcccctgggggctgattcccaagtgtgagtcgccccagatcaccagcccggcctgctcccagcagccctaaggatctctcaggagcacaggcagctggatgagacttccaaacctgacagatgtcagccgagccgggcctggggctcctttctccagccagcaatgatgtccagaagaatattcaggacttaacggctccaggattttaacaaaagcaagactgttgctcaaatctattcagacaagcaacaggttttataatttttttattactgattttgttatttttatatcagcctgagtctcctgtgcccacatcccaggcttcaccctgaatggttccatgcctgagggtggagactaagccctgtcgagacacttgccttcttcacccagctaatctgtagggctggacctatgtcctaaggacacactaatcgaactatgaactacaaagcttctatcccaggaggtggctatggccacccgttctgctggcctggatctccccactctaggggtcaggctccattaggatttgccccttcccatctcttcctacccaaccactcaaattaatctttctttacctgagaccagttgggagcactggagtgcagggaggagaggggaagggccagtctgggctgccgggttctagtctcctttgcactgagggccacactattaccatgagaagagggcctgtgggagcctgcaaactcactgctcaagaagacatggagactcctgccctgttgtgtatagatgcaagatatttatatatatttttggttgtcaatattaaatacagacactaagttatagtatatctggacaagccaacttgtaaatacaccacctcactcctgttacttacctaaacagatataaatggctggtttttagaaacatggttttgaaatgcttgtggattgagggtaggaggtttggatgggagtgagacagaagtaagtggggttgcaaccactgcaacggcttagacttcgactcaggatccagtcccttacacgtacctctcatcagtgtcctcttgctcaaaaatctgtttgatccctgttacccagagaatatatacattctttatcttgacattcaaggcatttctatcacatatttgatagttggtgttcaaaaaaacactagttttgtgccagccgtgatgctcaggcttgaaatcgcattattttgaatgtgaagggaa

SEQ ID NO: 49 - DNA, 3915 bp, Human
gtggggtggggtggggctgggggcttgtcgccctttcaggctccaccctttgcggagattataaatagtcatgatcccagcgagacccagagatgcctgtaatggtgagactttggatccttcctgaggacgtggagaaaactttctgctgagaaggacattttgaaggttttgttggctgaaaaagctgtttctggaatcacccctagatctttcttgaagacttgaattagattacagcgatggggacacagaaggtcaccccagctctgatatttgccatcacagttgctacaatcggctctttccaatttggctacaacactggggtcatcaatgctcctgagaagatcataaaggaatttatcaataaaactttgacggacaagggaaatgccccaccctctgaggtgctgctcacgtctctctggtccttgtctgtggccatattttccgtcgggggtatgatcggctccttttccgtcggactcttcgtcaaccgctttggcaggcgcaattcaatgctgattgtcaacctgttggctgtcactggtggctgctttatgggactgtgtaaagtagctaagtcggttgaaatgctgatcctgggtcgcttggttattggcctcttctgcggactctgcacaggttttgtgcccatgtacattggagagatctcgcctactgccctgcggggtgcctttggcactctcaaccagctgggcatcgttgttggaattctggtggcccagatctttggtctggaattcatccttgggtctgaagagctatggccgctgctactgggttttaccatccttcctgctatcctacaaagtgcagcccttccattttgccctgaaagtcccagatttttgctcattaacagaaaagaagaggagaatgctaagcagatcctccagcggttgtggggcacccaggatgtatcccaagacatccaggagatgaaagatgagagtgcaaggatgtcacaagaaaagcaagtcaccgtgctagagctctttagagtgtccagctaccgacagcccatcatcatttccattgtgctccagctctctcagcagctctctgggatcaatgctgtgttctattactcaacaggaatcttcaaggatgcaggtgttcaagagcccatctatgccaccatcggcgcgggtgtggttaatactatcttcactgtagtttctctatttctggtggaaagggcaggaagaaggactctgcatatgataggccttggagggatggctttttgttccacgctcatgactgtttctttgttattaaaggataactataatgggatgagctttgtctgtattggggctatcttggtctttgtagccttctttgaaattggaccaggccccattccctggtttattgtggccgaactcttcagccagggcccccgcccagctgcgatggcagtggccggctgctccaactggacctccaacttcctagtcggattgctcttcccctccgctgctcactatttaggagcctacgtttttattatcttcaccggcttcctcattaccttcttggcttttaccttcttcaaagtccctgagacccgtggcaggacttttgaggatatcacacgggcctttgaagggcaggcacacggtgcagatagatctggaaaggacggcgtcatggagatgaacagcatcgagcctgctaaggagaccaccaccaatgtctaagtcgtgcctccttccacctccctcccggcatgggaaagccacctctccctcaacaagggagagacctcatcaggatgaacccaggacgcttctgaatgctgctacttaattcctttctcatcccacgcactccatgagcaccccaaggctgcggtttgttggatcttcaatggctttttaaattttatttcctggacatcctcttctgcttaggagagaccgagtgaacctaccttcatttcaggagggattggccgcttggcacatgacaactttgccagcttttcctcccttgggttctgatattgccgcactaggggatataggagaggaaaagtaaggtgcagttcccccaacctcagacttaccaggaagcagatacatatgagtgtggaagccggagggtgtttatgtaagagcaccttcctcacttccatacagctctacgtggcaaattaacttgagttttatttattttatcctctggtttaattacataatttttttttttttactttaagtttcaggatacatgtgccgaatgtgcaggtttgttacataggtatatatatgccatgatggaaatatttatttttttaagcgtaattttgccaaataataaaaacagaaggaaattgagattagagggaggtgtttaaagagaggttatagagtagaagatttgatgctggagaggttaaggtgcaataagaatttagggagaaatgttgttcattattggagggtaaatgatgtggtgcctgaggtctgtacgttacctcttaacaatttctgtccttcagatggaaactctttaacttctcgtaaaagtcatatacctatataataaagctactgatttccttggagcttttttctttaagataatagtttacatgtagtagtacttgaaatctaggattattaactaatatgggcattgtagttaatgatggttgatgggttctaattttggatggagtccagggaagagaaagtgatttctagaaagcctgttcccctcactggatgaaataactccttcttgtagtagtctcattacttttgaagtaatcccgccacctatctcgtgggagagccatccaaataagaaacctaaaataattggttcttggtagagattcattatttttccactttgttctttaggagattttaggtgttgattttctgttgtattttaactcatacctttaaaggaattccccaaagaatgtttatagcaaacttggaatttgtaacctcagctctgggagaggatttttttctgagcgattattatctaaagtgtgttgttgctttaggctcacggcacgcttgcgtatgtctgttaccatgtcactgtggtcctatgccgaatgccctcaggggacttgaatctttccaataaaccaggtttagacagtatgagtcaatgtgcagtgtagcccacacttgagaggatgaatgtatgtgcactgtcactttgctctgggtggaagtacgttattgttgacttattttctctgtgtttgttcctacagcccctttttcatatgttgctcagtctccctttcccttcttggtgcttacacatctcagaccctttagccaaacccttgtcagtgacagtattttggttcttagttctcactgttccctctgctcctggagcctttgaataaaaatgcacgtagctgaggccggatgcggtggctcacgcctgtaatcccagcactttgggaggcctaggcgggcggtcaggggttcgagaccagtctggccaacatcgtgaaaccctgtctctactaaaaatgcaaaaattagccgggcgtggtggcgggcgcctgtaatcccagctacttgggaagctgaggcgggagaatcatgtgaacccgggacgcaggggttgcagtgagcggagatcgcatcattgcactctagcctgggccacagggcgagactccgtctcaaaaaaaaaaaaatgcacatagctatcgagtgtgctttagcttgaaaaggtgaccttgcaacttcatgtcaactttctggctcctcaaacagtaggttggcagtaaggcagggtcccatttctcactgagaagattgtgaatatttccatatggattttctattgttactctggttctttgttttaaaataaaaattctgaatgtacacg

SEQ ID NO: 50 - DNA, 2218 bp, Human
cttctctctccattcagtgcacgcgttactttggctaaaaggaggtgagcggcactctgcccttccagagcaagcatggagcaacaggatcagagcatgaaggaagggaggctgacgcttgtgcttgccctggcaaccctgatagctgcctttgggtcatccttccagtatgggtacaacgtggctgctgtcaactccccagcactgctcatgcaacaattttacaatgagacttactatggtaggaccggtgaattcatggaagacttccccttgacgttgctgtggtctgtaaccgtgtccatgtttccatttggagggtttatcggatccctcctggtcggccccttggtgaataaatttggcagaaaaggggccttgctgttcaacaacatattttctatcgtgcctgcgatcttaatgggatgcagcagagtcgccacatcatttgagcttatcattatttccagacttttggtgggaatatgtgcaggtgtatcttccaacgtggtccccatgtacttaggggagctggcccctaaaaacctgcggggggctctcggggtggtgccccagctcttcatcactgttggcatccttgtggcccagatctttggtcttcggaatctccttgcaaacgtagatggctggccgatcctgctggggctgaccggggtccccgcggcgctgcagctccttctgctgcccttcttccccgagagccccaggtacctgctgattcagaagaaagacgaagcggccgccaagaaagccctacagacgctgcgcggctgggactctgtggacagggaggtggccgagatccggcaggaggatgaggcagagaaggccgcgggcttcatctccgtgctgaagctgttccggatgcgctcgctgcgctggcagctgctgtccatcatcgtcctcatgggcggccagcagctgtcgggcgtcaacgctatctactactacgcggaccagatctacctgagcgccggcgtgccggaggagcacgtgcagtacgtgacggccggcaccggggccgtgaacgtggtcatgaccttctgcgccgtgttcgtggtggagctcctgggtcggaggctgctgctgctgctgggcttctccatctgcctcatagcctgctgcgtgctcactgcagctctggcactgcaggacacagtgtcctggatgccatacatcagcatcgtctgtgtcatctcctacgtcataggacatgccctcgggcccagtcccatacccgcgctgctcatcactgagatcttcctgcagtcctctcggccatctgccttcatggtggggggcagtgtgcactggctctccaacttcaccgtgggcttgatcttcccgttcatccaggagggcctcggcccgtacagcttcattgtcttcgccgtgatctgcctcctcaccaccatctacatcttcttgattgtcccggagaccaaggccaagacgttcatagagatcaaccagattttcaccaagatgaataaggtgtctgaagtgtacccggaaaaggaggaactgaaagagcttccacctgtcacttcggaacagtgactctggagaggaagccagtggagctggtctgccaggggcttcccactttggcttatttttctgacttctagctgtctgtgaatatccagaaataaaacaactctgatgtggaatgcagtcctcatctccagcctccccaccccagtgggaactgtgcaaagggctgccttgctgttcttgaagctgggctgtctctctccatgttggcctgtcaccagacccgagtcaattaaacagctggtcctccactttgctggttcagccttcgtgtggctcctggtaacgtggctccaccttgatgggtcaacctttgtgtggctcctggtaacataacaacaacagttactatagtggtgagatggaaggaatcaaattttgccagagaaactaactcggtggccccaacaggtcttccggggccatgggcatttgtttagagccaaattcatcctcttaccagatccttttccagaaatacctgtctaggaaggtgtgatgtcagaaacaatgacatccagaaagctgaggaacaggttcctgtggagacactgagtcagaattcttcatccaaattattttgttagtggaaaatggaattgcttctgtgtagtcaataaaatgaacctgatcacttttc

SEQ ID NO: 51 - DNA, 5599 bp, Human
aaagccttcggaaatagaaacaaagttggtcacaaatcacattagctttgcccgaagtttttccccacactcttctttagcatgctattatggggaaagtgaccactcctgggagcgggggtggtcggggcggtttggtggcggggaagcggctgtaacttctacgtgaccatggtacctgttgaaaacaccgagggccccagtctgctgaaccagaaggggacagccgtggagacggagggcagcggcagccggcatcctccctgggcgagaggctgcggcatgtttaccttcctgtcatctgtcactgctgctgtcagtggcctcctggtgggttatgaacttgggatcatctctggggctcttcttcagatcaaaaccttattagccctgagctgccatgagcaggaaatggttgtgagctccctcgtcattggagccctccttgcctcactcaccggaggggtcctgatagacagatatggaagaaggacagcaatcatcttgtcatcctgcctgcttggactcggaagcttagtcttgatcctcagtttatcctacacggttcttatagtgggacgcattgccataggggtctccatctccctctcttccattgccacttgtgtttacatcgcagagattgctcctcaacacagaagaggccttcttgtgtcactgaatgagctgatgattgtcatcggcattctttctgcctatatttcaaattacgcatttgccaatgttttccatggctggaagtacatgtttggtcttgtgattcccttgggagttttgcaagcaattgcaatgtattttcttcctccaagccctcggtttctggtgatgaaaggacaagagggagctgctagcaaggttcttggaaggttaagagcactctcagatacaactgaggaactcactgtgatcaaatcctccctgaaagatgaatatcagtacagtttttgggatctgtttcgttcaaaagacaacatgcggacccgaataatgataggactaacactagtattttttgtacaaatcactggccaaccaaacatattgttctatgcatcaactgttttgaagtcagttggatttcaaagcaatgaggcagctagcctcgcctccactggggttggagtcgtcaaggtcattagcaccatccctgccactcttcttgtagaccatgtcggcagcaaaacattcctctgcattggctcctctgtgatggcagcttcgttggtgaccatgggcatcgtaaatctcaacatccacatgaacttcacccatatctgcagaagccacaattctatcaaccagtccttggatgagtctgtgatttatggaccaggaaacctgtcaaccaacaacaatactctcagagaccacttcaaagggatttcttcccatagcagaagctcactcatgcccctgagaaatgatgtggataagagaggggagacgacctcagcatccttgctaaatgctggattaagccacactgaataccagatagtcacagaccctggggacgtcccagcttttttgaaatggctgtccttagccagcttgcttgtttatgttgctgctttttcaattggtctaggaccaatgccctggctggtgctcagcgagatctttcctggtgggatcagaggacgagccatggctttaacttctagcatgaactggggcatcaatctcctcatctcgctgacatttttgactgtaactgatcttattggcctgccatgggtgtgctttatatatacaatcatgagtctagcatccctgctttttgttgttatgtttatacctgagacaaagggatgctctttggaacaaatatcaatggagctagcaaaagtgaactatgtgaaaaacaacatttgttttatgagtcatcaccaagaagaattagtgccaaaacagcctcaaaaaagaaaaccccaggagcagctcttggagtgtaacaagctgtgtggtaggggccaatccaggcagctttctccagagacctaatggcctcaacaccttctgaacgtggatagtgccagaacacttaggagggtgtctttggaccaatgcatagttgcgactcctgtgctctcttttcagtgtcatggaactggttttgaagagacactctgaaatgataaagacagcctttaatccccctcctccccagaaggaacctcaaaaggtagatgaggtacaaggtcctaagtgatctctttttctgagcaggatatcaggttaaaaaaaaaaagttactggctggtttaatactttctaccttcttcacagagcagcctttgaatagactatgtcctagtgaagacatcaacctccgccttaagctatgtatgtatggaggccagtcgcagctttattatgcagacacacaagtggtctggacatgagggtacagtttctgcctaccaagacactacttgcactggatcttacgcaaaaaagaaccagaacacacagtgtggacaactgcccatatattctatctagattaggagagggtcctggctaggattttagtggtaattcctagttacattcaacaagtataaagattatagagcttattttatgaactataaactataatttaatgcaaaatatccttttatgaatttcatgttaatattgtgaaatattaaaataattccacaatagttgagaaaaatgagcatttttttccatttttaaaaaatgcatagaaaagacaattttaaaatcctgggaccatatttatttagaagtagctgttagtaaaacattagaaaaggagtcaggccattaggttatttatccaaatctctaagcaattaggttgaagttattaagtcaagcctagaaaagctgcctccttgtaaggctttcatgacaatgtatagtaatccacagtgtccaattcttcacactcctcaggaatatcactacctcaggttacggtacacaggctataattgatgatgatgttcagataactgaagacacaataaatgacattcagacatcaggacaattccctcatgttcttttctatgatggccacctgtaccagcaacgtgggtttcacccacacaacgatgaactgttctcttacttctccagttgattttaaagacttgttaagaggtcttactaataaaatttgggtatgatagaaaatccacaatcaaatcttgaaccaaataacatattaaattactaatatttaagtgatggaagacacacaaaaaacttaaaagcacgaacaacctaacttgaaaaagaattttaaaatatgattaacctgaagaaaagagaatcctaagagccaaagctcctttttatttagcttggaattttcctattggttcctaacaaactgtcccaatgtcatataaggaaacatgatctattacattcctttataacaatgtggagagactataaacctatgtaagtagtaaaactatatcagagactcaggagactgactaaaaggcctggatctgcagtgtattatctgtataaaaattggcagggggaagctaaaaggaaaggagattggagatctcaattctatcatggtgtatttcatacgcaaatcagagcatgcattgttttttgtttttggaaagagaagggaagtgtgttctgccccatgtttccttccgtgtttatagttcaaactctatatatacttcaggtattttttgtttagcccttcattataaatgggcaggaaattgtttatcaacctagccagtttattactagtgaccttgacttcagtatcttgagcattcttttatatttttcttttattatcctgagtctgtaactaaacaattttgtcttcaaatttttatccaatatccattgcaccacaccaaatcaagcttcttgattttcaaaaataaaaagggggaaatacttacaacttgtacatatatattcacagtttttatttataaaaaaaatttacagtacttatggagagccagcagaagacatcagagcactcacttcttcccatctttgttaaggttagcgaattacccatggacactgttaggtgaggctcattcggcagccctgaaaacaaacctggtcacactgtctttaccctctcccttcagataaagcacttcgattatctattgatctgcccagttttcaagtcatgcgaatactaaaaaggttacatcatctggatctgtaccttggctatataagcatgttttccccctattctatgtttctttttttggtgaacattgaaaaacaggaggtgacttattactgttaattaaaactaaatgaaaaatgtcaagtctttaaaacagtgagcttgtaactctttcatgtaattttattctctatgaatttggctatcctactgaatcttaaaataaaggaaataaacactttttttttaaaaaaaaggaaaaatacaagtctaaaaatctcaatgaaatatttcacaagaaggaaaaatgtaagttagcctttgctttccactttggaataagcaggaggttagggaaggcattgagaagaaaaaagataaaaataatatgtgttgttcagtgcagtgcctaagctaggttttcaagattttataatacagtaaggaaaatgtactatatatggagattaggatgttgcaatttttccacaaaggtttaaaaacattttggaaatacaagtttttgtggaacattgtgttggaatattgtccccattaagtttctcctgagaagctaattggactctccactcagctttatttctaggtataatcactgttggttacactaaactcctaaacctaaatgacagggcacaactacagcttgatcctgtattaccacatcagggctcctgggtgagccagagacactgtttcataaatgcatatttattataactttaagagtagcaatctcatatactgaatagtcactctttaactccattaaataagatacagcaaggggaaggacagtatcacacaaaatggctttcaaattcaagtggggctatttgataattacactgtggcacagaggcagcttatgggcacttcttgttaaaacatctccatgttaccaacttctgacaagactcttagtataggcttgggcatcaacccaagattaaagtcaagaacctcaatcacttctctacaactacaggtgttgagtctttccagaaaaacaaaggtccaaatgaggcaccattcatcacagcttctttctcatttccatctagtgggtaagaggtttctcttcttaaaactacaatttcttaacctttacaagttatttaacattttctatcatattaaattagcaacataaaacattatcctttatctataaacttctagtctggttccctagagtttatatacacgtttttatttctaatctgcaagaaaaaaaattcctatttgttatttggtaacagagcattaaaagatactatacacatgtggtgcatatatatatatatatatacacacacacacacacacacacacaaaatacacttcaaaaagaagccaacacactttagccaaagtctt

SEQ ID NO: 52 - DNA, 2162 bp, Human
gggctgcgctgtccagctgtggctatggccccagccccgagatgaggagggagagaactaggggcccgcaggcctgggaatttccgtcccccaccaagtccggatgctcactccaaagtctcagcaggcccctgagggagggagctgtcagccagggaaaaccgagaacaccatcaccatgacaaccagtcaccagcctcaggacagatacaaagctgtctggcttatcttcttcatgctgggtctgggaacgctgctcccgtggaattttttcatgacggccactcagtatttcacaaaccgcctggacatgtcccagaatgtgtccttggtcactgctgaactgagcaaggacgcccaggcgtcagccgcccctgcagcacccttgcctgagcggaactctctcagtgccatcttcaacaatgtcatgaccctatgtgccatgctgcccctgctgttattcacctacctcaactccttcctgcatcagaggatcccccagtccgtacggatcctgggcagcctggtggccatcctgctggtgtttctgatcactgccatcctggtgaaggtgcagctggatgctctgcccttctttgtcatcaccatgatcaagatcgtgctcattaattcatttggtgccatcctgcagggcagcctgtttggtctggctggccttctgcctgccagctacacggcccccatcatgagtggccagggcctagcaggcttctttgcctccgtggccatgatctgcgctattgccagtggctcggaactatcagaaagtgccttcggctactttatcacagcctgtgctgttatcattttgaccatcatctgttacctgggcctgccccgcctggaattctaccgctactaccagcagctcaagcttgaaggacccggggagcaggagaccaagttggacctcattagcaaaggagaggagccaagagcaggcaaagaggaatctggagtttcagtctccaactctcagcccaccaatgaaagccactctatcaaagccatcctgaaaaatatctcagtcctggctttctctgtctgcttcatcttcactatcaccattgggatgtttccagccgtgactgttgaggtcaagtccagcatcgcaggcagcagcacctgggaacgttacttcattcctgtgtcctgtttcttgactttcaatatctttgactggttgggccggagcctcacagctgtattcatgtggcctgggaaggacagccgctggctgccaagcctggtgctggcccggctggtgtttgtgccactgctgctgctgtgcaacattaagccccgccgctacctgactgtggtcttcgagcacgatgcctggttcatcttcttcatggctgcctttgccttctccaacggctacctcgccagcctctgcatgtgcttcgggcccaagaaagtgaagccagctgaggcagagaccgcaggagccatcatggccttcttcctgtgtctgggtctggcactgggggctgttttctccttcctgttccgggcaattgtgtgacaaaggatggacagaaggactgcctgcctccctccctgtctgcctcctgccccttccttctgccaggggtgatcctgagtggtctggcggttttttcttctaactgacttctgctttccacggcgtgtgctgggcccggatctccaggccctggggagggagcctctggacggacagtggggacattgtgggtttggggctcagagtcgagggacggggtgtagcctcggcatttgcttgagtttctccactcttggctctgactgatccctgcttgtgcaggccagtggaggctcttgggcttggagaacacgtgtgtctctgtgtatgtgtctgtgtgtctgcgtccgtgtctgtcagactgtctgcctgtcctggggtggctaggagctgggtctgaccgttgtatggtttgacctgatatactccattctcccctgcgcctcctcctctgtgttttttccatgtccccctcccaactccccatgcccagtttttacccatcatgcaccctgtacagttgccacgttactgccttttttaaaaatatatttgacagaaaccaggtgccttcagaggctctctgatttaaataaacctttcttgttttttt

SEQ ID NO: 53 - DNA, 2529 bp, Human
ggtggcgcgaccctctgtccccgcctcggggcggagcccaggtcccagcctgcggagcgcgagacacgccgaaatccgcccgaggctacctgtgcgactccagccgccctgcaccggaatctggggagacccgccccccgccccaccggtctgcggccctccgccccagcgcaggtgcaggtgcggcttctctgcccctttcaccccaggcgcatccgccgcggcggccatggcgcgaggagacgccccgcgggacagctaccacctggtcgggatcagcttcttcatcctggggctgggcaccctccttccctggaacttcttcatcaccgccatcccgtacttccaggcgcgactggccggggccggcaacagcacagccaggatcctgagcaccaaccacacgggtcccgaggatgccttcaacttcaacaattgggtgacgctgctgtcccagctgcccctgctgctcttcaccctcctcaactccttcctgtaccagtgcgtcccggagacggtgcgcattctgggcagcctgctggccatactgctgctctttgccctgacagcagcgctggtcaaggtggacatgagccccggacccttcttctccatcaccatggcctccgtctgcttcatcaactccttcagtgcagtcctacagggcagcctcttcgggcagctgggcaccatgccctccacctacagcaccctcttcctcagcggccagggcctggctgggatctttgctgcccttgccatgctcctgtccatggccagtggcgtggacgccgagacctctgccctggggtactttatcacgccctgtgtgggcatcctcatgtccatcgtgtgttacctgagcctgcctcacctgaagtttgcccgctactacctggccaataaatcatcccaggcccaagctcaggagctggagaccaaagctgagctcctccagtctgatgagaacgggattcccagtagtccccagaaagtagctctgaccctggatcttgacctggagaaggagccggaatcagagccagatgagccccagaagccaggaaaaccttcagtcttcactgtcttccagaagatctggctgacagcgctgtgccttgtgttggtcttcacagtcaccctgtccgtcttccccgccatcacagccatggtgaccagctccaccagtcctgggaagtggagtcagttcttcaaccccatctgctgcttcctcctcttcaacatcatggactggctgggacggagcctgacctcttacttcctgtggccagacgaggacagccggctgctgcccctgctggtctgcctgcggttcctgttcgtgcccctcttcatgctgtgccacgtgccccagaggtcccggctgcccatcctcttcccacaggatgcctacttcatcaccttcatgctgctctttgccgtttctaatggctacctggtgtccctcaccatgtgcctggcgcccaggcaggtgctgccacacgagagggaggtggccggcgccctcatgaccttcttcctggccctgggactttcctgtggagcctccctctccttcctcttcaaggcgctgctctgaagtggcccctccaggctctttggcagcctcttctcgacgtctccttccggagctgagatccagcccagggcgaatggcgagcttggctcaggcctctgcggggtggaggcccctgggcctgaggctgccagcagcgggcaggagctgctcttcatccacttggagtgctgcggggaagaaatcaccaccggtcattctaaccctcacccaggaatgggggtgactcgcacaagacctcatggaaagggtgatgactagggaaaagagggtgcagggcacggctgctccccaccaccaggtctgcatttgttcatcatcatcaggagcagaggtgaccagagggttcagagtgggaggcggggccagcccaggccaggagcgcctcatcttcccaggcctcagccacccagggtaaaaggtgccagggaagttgtgggcacctgagaggaggaacagatgtggaggacctgagggtgctcaaagggccaggctcagcctcaagcagtgttttcattgccaacacttactgtacccactccgcagagcccagctgggcctgggccccagggccacagctagcctgcatgtgtgtactgcactttacagtttgcaaagctcttccatacccactctctcaccgaagcctaattgaggctcttggaaggagtcaggcaaggattgtgcttcccccattatacaggtgacaaaactgagtcctggggaaagtgactggtccgtggtagagccgggacccaatcccctctctctcctccctgttggtgctgttcttcctgcccaacacctgtttctcttttcctcaaggggtttggggcaggagcctgggcacttactccccgtttttgctgtttctccttctgaccctgctcttgggtctaataaccccatttatttgtaaaaaaaaaaaaaaa

SEQ ID NO: 54 - DNA, 2243 bp, Human
cgccggaggcagcggcggcgtggcgcagcggcgacatggccgttgtctcagaggacgactttcagcacagttcaaactccacctacggaaccacaagcagcagtctccgagctgaccaggaggcactgcttgagaagctgctggaccgcccgccccctggcctgcagaggcccgaggaccgcttctgtggcacatacatcatcttcttcagcctgggcattggcagtctactgccatggaacttctttatcactgccaaggagtactggatgttcaaactccgcaactcctccagcccagccaccggggaggaccctgagggctcagacatcctgaactactttgagagctaccttgccgttgcctccaccgtgccctccatgctgtgcctggtggccaacttcctgcttgtcaacagggttgcagtccacatccgtgtcctggcctcactgacggtcatcctggccatcttcatggtgataactgcactggtgaaggtggacacttcctcctggacccgtggtttttttgcggtcaccattgtctgcatggtgatcctcagcggtgcctccactgtcttcagcagcagcatctacggcatgaccggctcctttcctatgaggaactcccaagcactgatatcaggaggagccatgggcgggacggtcagcgccgtggcctcattggtggacttggctgcatccagtgatgtgaggaacagcgccctggccttcttcctgacggccaccatcttcctcgtgctctgcatgggactctacctgctgctgtccaggctggagtatgccaggtactacatgaggcctgttcttgcggcccatgtgttttctggtgaagaggagcttccccaggactccctcagtgccccttcggtggcctccagattcattgattcccacacaccccctctccgccccatcctgaagaagacggccagcctgggcttctgtgtcacctacgtcttcttcatcaccagcctcatctaccccgccgtctgcaccaacatcgagtccctcaacaagggctcgggctcactgtggaccaccaagtttttcatccccctcactaccttcctcctgtacaactttgctgacctatgtggccggcagctcaccgcctggatccaggtgccagggcccaacagcaaggcgctcccagggttcgtgctcctccggacctgcctcatccccctcttcgtgctctgtaactaccagccccgcgtccacctgaagactgtggtcttccagtccgatgtgtaccccgcactcctcagctccctgctggggctcagcaacggctacctcagcaccctggccctcctctacgggcctaagattgtgcccagggagctggctgaggccacgggagtggtgatgtccttttatgtgtgcttgggcttaacactgggctcagcctgctctaccctcctggtgcacctcatctagaagggaggacacaaggacattggtgcttcagagcctttgaagatgagaagagagtgcaggagggctgggggccatggaggaaaggcctaaagtttcacttggggacagagagcagagcacactcgggcctcatccctcccaagatgccagtgagccacgtccatgcccattccgtgcaaggcagatattccagtcatattaacagaacactcctgagacagttgaagaagaaatagcacaaatcaggggtactcccttcacagctgatggttaacattccaccttctttctagcccttcaaagatgctgccagtgttcgccctagagttattacaaagccagtgccaaaacccagccatgggctctttgcaacctcccagctgcgctcattccagctgacagcgagatgcaagcaaatgctcagctctccttaccctgaaggggtctccctggaatggaagtcccctggcatggtcagtcctcaggcccaagactcaagtgtgcacagacccctgtgttctgcgggtgaacaactgcccactaaccagactggaaaacccagaaagatgggccttccatgaatgcttcattccagagggaccagagggcctccctgtgcaagggatcaagcatgtctggcctgggttttcaaaaaaagagggatcctcatgacctggtggtctatggcctgggtcaagatgagggtctttcagtgttcctgtttacaacatgtcaaagccattggttcaagggcgtaataaatacttgcgtattcaaaaa

SEQ ID NO: 55 - DNA, 2907 bp, Human
tggtggcctgggctgtgctcgtcgccgcgctcgtggaccggggccgggcggactcggggaccggcggaggacgccgggcgcgcccggcccgaggctgggggagcggggcggcgtggcgggcgcgccgaggaccccaggccgggccgggccgagaggctgccatgggctccgtggggagccagcgccttgaggagcccagcgtggcaggcacaccagacccgggcgtagtgatgagcttcaccttcgacagtcaccagctggaggaggcggcggaggcggctcagggccagggccttagggccaggggcgtcccagctttcacggatactacattggacgagccagtgcccgatgaccgttatcacgccatctactttgcgatgctgctggctggcgtgggcttcctgctgccatacaacagcttcatcacggacgtggactacctgcatcacaagtacccagggacctccatcgtgtttgacatgagcctcacctacatcttggtggcactggcagctgtcctcctgaacaacgtcctggtggagagactgaccctgcacaccaggatcaccgcaggctacctcttagccttgggccctctcctttttatcagcatctgcgacgtgtggctgcagctcttctctcgggaccaggcctacgccatcaacctggccgctgtgggcaccgtggccttcggctgcacagtgcagcaatccagcttctacgggtacacggggatgctgcccaagcggtacacgcagggggtgatgaccggggagagcacggcgggcgtgatgatctctctgagccgcatcctcacgaagctgctgctgcccgacgagcgcgccagcacgctcatcttcttcctggtgtcggtggcgctggagctgctgtgtttcctgctgcacctgttagtgcggcgcagccgcttcgtgctcttctataccacacggccgcgtgacagccaccggggcaggccaggcctgggcaggggctatggctaccgcgtgcaccacgacgttgtcgccggggacgtccacttcgagcacccagccccggccctggcccccaacgagtccccaaaggacagcccagcccacgaggtgaccggcagcggcggggcctacatgcgctttgatgtgccgcggccaagggtccagcgcagctggcccaccttcagagccctgttactgcaccgctacgtggtggcgcgggtgatctgggccgacatgctctccatcgccgtgacctacttcatcacgctgtgcctgttccccggcctcgagtctgagatccgccactgcatcctgggcgagtggctgcccatcctcatcatggctgtgttcaacctgtcagacttcgtgggcaagatcctggcagccctgcccgtggactggcggggcacccacctgctggcctgctcctgcctgcgtgtggtcttcatccccctcttcatcctgtgcgtctaccccagcggcatgcccgccctccgtcaccccgcctggccctgcatcttctcactgctcatgggcatcagcaacggctacttcggcagcgtgcccatgatcctggcggcaggcaaagtgagccccaagcagcgggagctggcagggaacaccatgaccgtgtcctacatgtcagggctgacgctggggtccgccgtggcctactgcacctacagcctcacccgcgacgctcacggcagctgcctgcacgcctccaccgccaatggttccatcctcgcaggcctctgagccagccccgcccactgccagggacgccgagggcctgaccaggggccccgaggcctgagggcccctcccctgtccccacctcagtgcctgcggggccctgagcctccccctgtgccagcagccccactccctcagggtccagccatgccccaccctggactgaagttctgcaaagtcctccgaggaccggaacacgtttctgcgacccggggctctggccagcactgtgttctgcgtttggtctcatacctgcgtctaccttccatctgtgtccagcggccccggctccagcccagccagcactctgcagggtcacacgcaccgtgtccccacccaggacagcagacacccgccagagtgtgcgcgcccagtgactgcaccccggccctcatcacccaccggcactgatcggggcaccgcctggcccagcctccaccagggacccctcctcatgaactctggagccctgagaggagaggggcagccccccaccttgtcaccctcagggcttccccttctgtcctcattcttagagactgcttctcccaaacataacgcgttagccatgaaggagtcggagccctgggtccgaatggacccgcctgcggtctgcatcagcctctgggaaaccacagcagtgatgccagctgggcacgtcaggacctccccacacacccacacgatgccacaggtcagggggctgtgcctgactagggagccctcccattgccttcctggcccgggatagaagaggggaggtaagtctgggggctacgaagccgggcccccacaccctggctgaagtcagcttgacctaggtcttgaccctcatccagcaagggactcgacagacccaagggtccctggaacgtagggaggggctgggggtcagtccagcccgggcctcccagaacaccaggcccgtgtgggtggcaccctgaggtcaggggatcctaagggtgtccttccagagacggtgtttccagggggaggaccgcccccgcttccagatccccggccccggctgtgactgccctgtttcacccctgctgtgtcccatcccccgtctgtccactaactgtaccgcaccggccattaaaagatgaaggcagaccgctgcaccgccgcctgcaaaaaaaaaaaaaaaaaaaaa

SEQ ID NO: 56 - DNA, 2750 bp, Human
gctgcactgcatggttgctgctggatgtgttgtgttcctggcttccctctggatgctgacagaaacaagggaatttctgctgaagtgacaaggcaagccagagccaaagcaggttggacccagcttgtccccacagagacgtgtgcttccctctctctctgagagcgacctgttaaccgcaaatacctggaaggtctgggacatggagaacgacccctcgagacgaagagagtccatctctctcacacctgtggccaagggtctggagaacatgggggctgatttcttggaaagcctggaggaaggccagctccctaggagtgacttgagccccgcagagatcaggagcagctggagcgaggcggcgccgaagcccttctccagatggaggaacctgcagccagccctgagagccagaagcttctgcagggagcacatgcagctgtttcgatggatcggcacaggcctgctctgcactgggctctctgccttcctgctggtggcctgcctcctggatttccagagggccctggctctgtttgtcctcacctgtgtggtcctcaccttcctgggccaccgcctgctgaaacggcttctggggccaaagctgaggaggtttctcaagcctcagggccatccccgcctgctgctctggtttaagaggggtctagctcttgctgctttcctgggcctggtcctgtggctgtctctggacacctcccagcggcctgagcaactggtgtccttcgcaggaatctgcgtgttcgtcgctctcctctttgcctgctcaaagcatcattgcgcagtgtcctggagggccgtgtcttggggacttggactgcagtttgtacttggactcctcgtcatcagaacagaaccaggattcattgcgttcgagtggctgggcgagcagatccggatcttcctgagctacacgaaggctggctccagcttcgtgtttggggaggcgctggtcaaggatgtctttgcctttcaggttctgcccatcattgtctttttcagctgtgtcatatccgttctctaccacgtgggcctcatgcagtgggtgatcctgaagattgcctggctgatgcaagtcaccatgggcaccacagccactgagaccctgagtgtggctggaaacatctttgtgagccagaccgaggctccattactgatccggccctacttggcagacatgacactctctgaagtccacgttgtcatgaccggaggttacgccaccattgctggcagcctgctgggtgcctacatctcctttgggatcgatgccacctcgttgattgcagcctctgtgatggctgccccttgtgccttggccctctccaagctggtctacccggaggtggaggagtccaagtttaggagggaggaaggagtgaaactgacctatggagatgctcagaacctcatagaagcagccagcactggggccgccatctccgtgaaggtggtcgccaacatcgctgccaacctgattgcgttcctggctgtgctggactttatcaatgctgccctctcctggctgggagacatggtggacatccaggggctcagcttccagctcatctgctcctacatcctgcggcctgtagccttcttgatgggtgtggcgtgggaggactgcccagtggtagctgagctgctggggatcaagctgtttctgaacgagtttgtggcctatcaagacctctccaagtacaagcaacgccgcctggcaggggccgaggagtgggtcggcgacaggaagcagtggatctccgtcagagctgaagtcctcacgacgtttgccctctgtggatttgccaatttcagctccattgggatcatgctgggaggcttgacctccatggtcccccaacggaagagcgacttctcccagatagtgctccgggcgctcttcacgggagcctgtgtgtccctggtgaacgcctgtatggcagggatcctctacatgcccaggggggctgaagttgactgcatgtccctcttgaacacgaccctcagcagcagtagctttgagatttaccagtgctgccgtgaggccttccagagcgtcaatccagagttcagcccagaggccctggacaactgctgtcggttttacaaccacacgatctgtgcacagtgaggacagaacatgcttgtgcttctgcgcttctgagggctgttctcccccgggaaccatctgtccccaccttccctttcccagagccctcttcagggaagccacaggacttagacccagctcaatcccacaattgggaaggggtcatggagtgagtgtgcagagagtgagtgaggacataaggaaggacatgtcccactccatcccccttcctgctcccccatttcctaactcccccagtgtgaattctcagggtcacttctgcctcctcccgtttcccctccacatccaaacagcaccctggtcctctctatcccccctctcctggggtccctcacatgccccttcccttctgttgtgggctgcacaccaaagcctcctcccctccccacttcctaggcactaggatctctctgtggcttcccctgctgggtggtgtcacctctttctctgctttcagagaaacccttcccgcctttcctcagagtgcttcccaaactgaggtcccatggcacactgtcctgggaggcgttcagagggttccatgatggactaggtttggaaccactgggttaaataaacttagagagggctgtttaaa

SEQ ID NO: 57 - DNA, 2459 bp, Human
tccttcactgaggagccagagggaatcaattccccaagctgggttgaggagaacaggagatggagaaagcaagtggaagacagtccattgctctgtccacagtggagactggcacagtgaacccggggctggagctcatggaaaaagaagtagagcctgagggaagcaagaggactgacgcacaaggacacagcctgggggatggactgggcccttccacttaccagaggaggagtcggtggcctttcagcaaagcaagaagtttctgcaaaacacacgccagattgttcaagaagatcctgttgggcctgttgtgtttggcctatgctgcctatctcctggcagcttgcatcttgaatttccagagggcactggccttgtttgtcatcacctgcttggtgatctttgtcctggttcactcgtttttgaaaaagctcctgggcaaaaaattaacaagatgtctgaagccctttgaaaactcccgcctgaggctttggacgaaatgggtgtttgcaggagtctccttggttggccttatactgtggttggctttagacacagcccaaaggccagagcagctgatcccctttgcaggaatctgcatgttcatccttatcctctttgcctgctccaaacaccacagcgcagtgtcctggaggacagtgttttcgggcctaggtcttcaatttgtctttgggatcttggtcatcagaactgatcttggatatactgtatttcagtggctgggagagcaggtccagattttcctgaactacactgtggccggctccagttttgtctttggggatacactggtcaaggatgtctttgcttttcaggccttaccaatcatcattttctttggatgtgtggtgtccattctctactacctgggcctggtgcaatgggtagttcagaaggtcgcctggtttttacaaatcactatgggcaccactgctacagagaccctggctgtggcaggaaacatctttgtgggtatgacagaggcacctctgctcatccgtccctaccttggggacatgacactctctgaaatccatgcggtgatgactggagggtttgccaccatttctggcactgtgctgggagccttcatagcctttggggttgatgcatcatccctgatttctgcctctgtgatggccgccccttgtgctctcgcctcatcaaagctagcgtatccggaagtggaggagtccaagttcaagagtgaggagggggtaaagctgccccgtgggaaggagaggaatgtcctggaagctgccagcaacggagccgtagatgccataggccttgctactaatgtagcagccaacctgattgcctttttggctgtgttggccttcatcaatgctgccctctcctggctgggggaattggtggacatacaggggctcactttccaggtcatctgctcctatctcctaaggcccatggttttcatgatgggtgtagagtggacagactgtccaatggtggctgagatggtgggaatcaagttcttcataaatgagtttgtggcttatcagcaactgtctcaatacaagaacaaacgtctctctggaatggaggagtggattgagggagagaaacagtggatttctgtgagagctgaaatcattacaacattttcactctgtggatttgccaatcttagttccataggaatcacacttggaggcttgacatcaatagtacctcaccggaagagtgacttgtccaaggttgtggtcagggccctcttcacaggggcctgtgtatcccttatcagtgcctgtatggcaggaatcctctatgtccccaggggagctgaagctgactgtgtctccttcccaaacacaagtttcaccaatagaacctatgagacctacatgtgctgcagagggctctttcagagtacttctctgaatggcaccaaccctccttctttttctggtccctgggaagataaggagttcagtgctatggcccttactaactgctgtggattctacaacaataccgtctgtgcctaaggctgcttgatctatttctataacagttttgatcttaaaagctttgtgattgcaaaggtgtttatgtactcagggtgcccacaactcactcaccaagatgtttaacagtaagtaacagtaaatgtaaaagattcattttgggccgggctcagtggctcacgcctgtaatcccagcgctttgggaggccgaggcgggcggatcgcagggtcaggagatcgagaccatcctggctaacacggtgaaaccccgtctctactaaaggtacaaaaaattggccgggagtggtgtcgggcgactgtagtcccagctactcgcgagactgaggcaggagaatggcgtgaatccgggaggcggagcttgcagcgagccgggatcgcgccactgtactccagcctgggtgacagagcgagactctgtctcag

SEQ ID NO: 58 - DNA, 2209 bp, Human
ctaaatgaagagcgcttgggacctgaacaaccagcagcgatacccaggtacaaaggacctccagaccagagccagccagcagcaaaaagagcatggagctgaggagtacagcagcccccagagctgagggctacagcaacgtgggcttccagaatgaagaaaactttcttgagaacgagaacacatcaggaaacaactcaataagaagcagagctgtgcaaagcagggagcacacaaacaccaaacaggatgaagaacaggtcacagttgagcaggattctccaagaaacagagaacacatggaggatgatgatgaggagatgcaacaaaaagggtgtttggaaaggaggtatgacacagtatgtggtttctgtaggaaacacaaaacaactcttcggcacatcatctggggcattttattagcaggttatctggttatggtgatttcggcctgtgtgctgaactttcacagagcccttcctctttttgtgatcaccgtggctgccatcttctttgttgtctgggatcacctgatggccaaatacgaacatcgaattgatgagatgctgtctcctggcagaaggcttctaaacagccattggttctggctgaagtgggtgatctggagctccctggtcctagcagttattttctggttggcctttgacactgccaaattgggtcaacagcagctggtgtccttcggtgggctcataatgtacattgtcctgttatttctattttccaagtacccaaccagagtttactggagacctgtcttatggggaatcgggctacagtttcttcttgggctcttgattctaaggactgaccctggatttatagcttttgattggttgggcagacaagttcagacttttctggagtacacagatgctggtgcttcatttgtctttggtgagaaatacaaagaccacttctttgcatttaaggtcctgccgatcgtggttttcttcagcactgtgatgtccatgctgtactacctgggactgatgcagtggattattagaaaggttggatggatcatgctagttactacgggatcatctcctattgaatctgtagttgcttctggcaatatatttgttggacaaacggagtctccactgctggtccgaccatatttaccttacatcaccaagtctgaactccacgccatcatgaccgccgggttctctaccattgctggaagcgtgctaggtgcatacatttcttttggggttccatcctcccacttgttaacagcgtcagttatgtcagcacctgcgtcattggctgctgctaaactcttttggcctgagacagaaaaacctaaaataaccctcaagaatgccatgaaaatggaaagtggtgattcagggaatcttctagaagctgcaacacagggagcatcctcctccatctccctggtggccaacatcgctgtgaatctgattgccttcctggccctgctgtcttttatgaattcagccctgtcctggtttggaaacatgtttgactacccacagctgagttttgagctaatctgctcctacatcttcatgcccttttccttcatgatgggagtggaatggcaggacagctttatggttgccagactcataggttataagaccttcttcaatgaatttgtggcttatgagcacctctcaaaatggatccacttgaggaaagaaggtggacccaaatttgtaaacggtgtgcagcaatatatatcaattcgttctgagataatcgccacttacgctctctgtggttttgccaatatcgggtccctaggaatcgtgatcggcggactcacatccatggctccttccagaaagcgtgatatcgcctcgggggcagtgagagctctgattgcggggaccgtggcctgcttcatgacagcctgcatcgcaggcatactctccagcactcctgtggacatcaactgccatcacgttttagagaatgccttcaactccactttccctggaaacacaaccaaggtgatagcttgttgccaaagtctgttgagcagcactgttgccaagggtcctggtgaagtcatcccaggaggaaaccacagtctgtattctttgaagggctgctgcacattgttgaatccatcgacctttaactgcaatgggatctctaatacattttgaggtcagccacttctccagtggaactctgaagtacagatgct

SEQ ID NO: 59 - DNA, 4562 bp, Human
cccgcactctgcgcctctcctcgcctttctcgcacctgctcctgcgccaggccgcgagacccccggggcggcttcccagaacctgcggagcacaactggccgaccgacccattcattgggaaccccgtcttttgccagagcccacgtcccctgccacctctagctcggagcggcgtgtagcgccatggagaagagcaacgagaccaacggctaccttgacagcgctcaggcggggcctgcggccgggcccggagctccggggaccgcggcgggacgcgcacggcgttgcgcgggcttcctgcggcgccaagcgctggtgctgctcaccgtgtccggggtgctggcgggcgcgggcctgggcgcggcgttgcgcgggctcagcctgagccgcacgcaggtcacctacctggccttccccggcgagatgctgctccgcatgctgcgcatgatcatcctgccgctggtggtctgcagcctggtgtcgggcgccgcctccctcgatgccagctgcctcgggcgtctgggcggcatcgctgtcgcctactttggcctcaccacactgagtgcctcggcgctcgccgtggccttggcgttcatcatcaagccaggatccggtgcgcagacccttcagtccagcgacctggggctggaggactcggggcctcctcctgtccccaaagagacggtggactctttcctcgacctggccagaaacctgtttccctccaatcttgtggttgcagctttccgtacgtatgcaaccgattataaagtcgtgacccagaacagcagctctggaaatgtaacccatgaaaagatccccataggcactgagatagaagggatgaacattttaggattggtcctgtttgctctggtgttaggagtggccttaaagaaactaggctccgaaggagaagacctcatccgtttcttcaattccctcaacgaggcgacgatggtgctggtgtcctggattatgtggtacgtacctgtgggcatcatgttccttgttggaagcaagatcgtggaaatgaaagacatcatcgtgctggtgaccagcctggggaaatacatcttcgcatctatattgggccatgttattcatggaggaattgttctgccacttatttattttgttttcacacgaaaaaacccattcagattcctcctgggcctcctcgccccatttgcgacagcatttgctacctgctccagctcagcgacccttccctctatgatgaagtgcattgaagagaacaatggtgtggacaagaggatcagcaggtttattctccccatcggggccaccgtgaacatggacggagcagccatcttccagtgtgtggccgcggtgttcattgcgcaactcaacaacgtagagctcaacgcaggacagattttcaccattctagtgactgccacagcgtccagtgttggagcagcaggcgtgccagctggaggggtcctcaccattgccattatcctggaggccattgggctgcctactcatgacctgcctctgatcctggctgtggactggattgtggaccggaccaccacggtggtgaatgtggaaggggatgccctgggtgcaggcattctccaccacctgaatcagaaggcaacaaagaaaggcgagcaggaacttgctgaggtgaaagtggaagccatccccaactgcaagtctgaggaggagacatcgcccctggtgacacaccagaaccccgctggccccgtggccagtgccccagaactggaatccaaggagtcggttctgtgatggggctgggctttgggcttgcctgccagcagtgatgtcccaccctgttcacccagccgccagtcatggacacagggcactgcccttgccaacttttaccctcccaagcaatgctttggcccagtcgctggcctgaggcttacctctcggcactggcattgggctccccagccggaactggttaccaaggacaaggacactctgacattcggcttgatccatgtccaggtgcaactgtgtgtacaccagggatctgtttggaaacaaccccttgagctgccaggctcaagaaatcatggactcacagggtcctgtgtggttacatcttggaaaaaatgcagatgtatttcactctccccggtcagctctgcatcaggtgttttctgagcaaaccaagggggtttatagtcatctgtcgcattgcctcgagttgcagtaattgaaaaaatgctcaaattcttagccatggctggcctttgctgagctgggactcaggtgtttaaagagtttgtgctatagctaggtgtggatagcttctgatccctgggttctgggagactgcaggtgccgcacattgtcaagttagaaatactccaggtgggtgttagcactgtggtggtctctggtccacagccttaggtaaacaacttagattctgaggtcaaagaaaaaaggagagggaatgcagccttgtgggggagaagcggggcagagggttctctaatctaatcaggacaggacaggtttcacatacaattgtcccagttcgcatcccagccctggggcacttttctgcttccttccagaggcctgggcctctgataacactttggctttttctccattcacgctgatttggcaaaaggccagagatgggcctccttccctggggaggtgtgatgtagttatcacattcaggacccttgttgatttatcatctattatttgaattcaactggacactctgtaaaatgctgcactgcagcaaaaacaaaaccaccaccaccccagagaaaaccatgtactaattggagtggggtacccccattcacaggttcccaggtcccctggctttggctgatttcaaaatatagagccctttcttgccagtacatccaagtttaaaattatcagcgaaatggtccatgtttttccaattacctgctgacacggttctaagctaagtgaaggggaagatctgagagcgtgctgtttgtggctgttgatgcatattcgtgatgtaacaggtcctggggcctcactttaccccatttgtaaaatggggctaatgtcacctgcctcttacctacctcagagggatttggtgaagcaaactgttaatcttcgaaaacgaccatttcacttcttggatatcaagtgctaacccagtatgttcttcttttttatgtaagggacagctttggagaaaggactgctctgtggagcagagtcctttctgctggtgaggacagcatttctgagcagggctttgttctctatgtgcattaggacttttatcatgcccttgttctgtgtgtagttacttgacagcatcaaatgccgcctcttcctaatgtccttcaagttttcatgaactagcaaccccaccttccaccatggttctgggcgcctgattttgctgtgactcccagacccagccactgtttctgccaccctgtaacaggccattaaagctccccagtgttcagcctccttcactcccttgttttccctgttgctatgtgtcacctgggccctacagacaggggcacacgcttatggatgtgtgtaccattgagatgagaatgggtagatggaacggagaccatcaagccacacccccttcttaaaactggggacatgagcctgagcagaaagggtgaagaagagccatgggacacagagttgacccagccagggggaaagcccagctctctttaaaccagctaagccattccagtctcctgtgaagccaaaagggaccaggaaccgtgcaaaggaaactggaaacttttccccgctgggtagagcatgttgctgatactcttctgttttcaagggaaacaatcacattgtttgattccaaatggtaaatgaacactcactattcttcaggcttcagtaaatctttttttcttccttcatatatatatacacaacacacacacacatatgtatatctatacacacatgtgtgttgtgtatatgcatgtgtgtgtgtgtgcgtgtgtgtatagttttagctccaagccaagcaagtttgtgtttggatagaggggaacttaactattaactacaagttgtatgtctgtggtatcttgattttcccatttctaaagatgaatttcacaaagccataaagcgtgaaattagagctggacttaagactcattggccgaccatcctgtgtcctggcctggccctgcagtaagaagcgtgtctgggtctggagaagggtgcttccgagagtgtgcaggtggcccttccccttggaggcgagaagagagaatgtgctgtctatcttcctggttttcagtccacagagtcggtagaccaggggttacgtgactggggaaaatctcacatctccttgtctgaaaacatttcccctgctgttctctttctaacatgttgtggtaaatctgttcagatactgctcatctgactgttttgtacatgtgacaattgccttaaaacctagcacagtcctcagaaatgaataccgtgtttccactggaaaaaaaaaaaaaaaaaaaaaaaaaaaaaaaaaaaaaaaaaa

SEQ ID NO: 60 - DNA, 2856 bp, Human
gtaaccgctactcccggacaccagaccaccgccttccgtacacaggggcccgcatcccaccctcccggacctaagagcctgggtcccctgtttccggaggtccgcttcccggcccccagattctggcatcccagccctcagtgtccaagacccaggcagcccgggtccccgcctcccggatccaggcgtccgggatctgcgccaccagaacctagcctcctgcagacctccgccatctgggggcactcaacctcctggagccaagggccccacgtcccacccagagaaactctcgtattcccagctcctagggccaaggaacccgggcgctccgaactcccagctttcggacatctggcacacggggcagagcagagaagctcagcgcccagcctggggaatttaaacactccagcttccaagagccaaggaacttcagtgctgtgaactcacaactctaaggagccctccaaagttccagtctccaggtgctgttactcaactcagtcctaggaacgtcgggtcctgggaaggagcccaagcgctcccagccagcttccaggcgctaagaaaccccggtgcttcccatcatggtggccgatcctcctcgagactccaaggggctcgcagcggcggagcccaccgccaacgggggcctggcgctggcctccatcgaggaccaaggcgcggcagcaggcggctactgcggttcccgggaccaggtgcgccgctgccttcgagccaacctgcttgtgctgctgacagtggtggccgtggtggccggcgtggcgctgggactgggggtgtcgggggccgggggtgcgctggcgttgggcccggagcgcttgagcgccttcgtcttcccgggcgagctgctgctgcgtctgctgcggatgatcatcttgccgctggtggtgtgcagcttgatcggcggcgccgccagcctggaccccggcgcgctcggccgtctgggcgcctgggcgctgctctttttcctggtcaccacgctgctggcgtcggcgctcggagtgggcttggcgctggctctgcagccgggcgccgcctccgccgccatcaacgcctccgtgggagccgcgggcagtgccgaaaatgcccccagcaaggaggtgctcgattcgttcctggatcttgcgagaaatatcttcccttccaacctggtgtcagcagcctttcgctcatactctaccacctatgaagagaggaatatcaccggaaccagggtgaaggtgcccgtggggcaggaggtggaggggatgaacatcctgggcttggtagtgtttgccatcgtctttggtgtggcgctgcggaagctggggcctgaaggggagctgcttatccgcttcttcaactccttcaatgaggccaccatggttctggtctcctggatcatgtggtacgcccctgtgggcatcatgttcctggtggctggcaagatcgtggagatggaggatgtgggtttactctttgcccgccttggcaagtacattctgtgctgcctgctgggtcacgccatccatgggctcctggtactgcccctcatctacttcctcttcacccgcaaaaacccctaccgcttcctgtggggcatcgtgacgccgctggccactgcctttgggacctcttccagttccgccacgctgccgctgatgatgaagtgcgtggaggagaataatggcgtggccaagcacatcagccgtttcatcctgcccatcggcgccaccgtcaacatggacggtgccgcgctcttccagtgcgtggccgcagtgttcattgcacagctcagccagcagtccttggacttcgtaaagatcatcaccatcctggtcacggccacagcgtccagcgtgggggcagcgggcatccctgctggaggtgtcctcactctggccatcatcctcgaagcagtcaacctcccggtcgaccatatctccttgatcctggctgtggactggctagtcgaccggtcctgtaccgtcctcaatgtagaaggtgacgctctgggggcaggactcctccaaaattatgtggaccgtacggagtcgagaagcacagagcctgagttgatacaagtgaagagtgagctgcccctggatccgctgccagtccccactgaggaaggaaaccccctcctcaaacactatcgggggcccgcaggggatgccacggtcgcctctgagaaggaatcagtcatgtaaaccccgggagggaccttccctgccctgctgggggtgctctttggacactggattatgaggaatggataaatggatgagctagggctctgggggtctgcctgcacactctggggagccaggggccccagcaccctccaggacaggagatctgggatgcctggctgctggagtacatgtgttcacaagggttactcctcaaaacccccagttctcactcatgtccccaactcaaggctagaaaacagcaagatggagaaataatgttctgctgcgtccccaccgtgacctgcctggcctcccctgtctcagggagcaggtcacaggtcaccatggggaattctagcccccactggggggatgttacaacaccatgctggttattttggcggctgtagttgtggggggatgtgtgtgtgcacgtgtgtgtgtgtgtgtgtgtgtgtgtgtgtgtgtgttctgtgacctcctgtccccatggtacgtcccaccctgtccccagatcccctattccctccacaataacagaaacactcccagggactctggggagaggctgaggacaaatacctgctgtcactccagaggacattttttttagcaataaaattgagtgtcaactatttaaaaaaaaaaaaaaaaa

SEQ ID NO: 61 - DNA, 2315 bp, Human
cctgaacttgcggcgcgaaaaaggcgcgcatgcgtcctacgggagcgtgctggctcaccgaccgcattgcggcttggttttctcacccagtgcatgtggcaggagcggtgagatcactgcctcacggcgatcctggactgacggtcacgactgcctaccctctaaccctgttctgagctgccccttgcccacacaccccaaacctgtgtgcaggatccgcctccatggagctacagcctcctgaagcctcgatcgccgtcgtgtcgattccgcgccagttgcctggctcacattcggaggctggtgtccagggtctcagcgcgggggacgactcagagttggggtctcactgtgttgcccagactggtctcgaactcttggcctcaggtgatcctcttccctcagcttcccagaatgccgagatgatagagacggggtctgactgtgttacccaggctggtcttcaactcttggcctcaagtgatcctcctgccttagcttccaagaatgctgaggttacaggcaccatgagccaggacaccgaggtggatatgaaggaggtggagctgaatgagttagagcccgagaagcagccgatgaacgcggcgtctggggcggccatgtccctggcgggagccgagaagaatggtctggtgaagatcaaggtggcggaagacgaggcggaggcggcagccgcggctaagttcacgggcctgtccaaggaggagctgctgaaggtggcaggcagccccggctgggtacgcacccgctgggcactgctgctgctcttctggctcggctggctcggcatgcttgctggtgccgtggtcataatcgtgcgagcgccgcgttgtcgcgagctaccggcgcagaagtggtggcacacgggcgccctctaccgcatcggcgaccttcaggccttccagggccacggcgcgggcaacctggcgggtctgaaggggcgtctcgattacctgagctctctgaaggtgaagggccttgtgctgggtccaattcacaagaaccagaaggatgatgtcgctcagactgacttgctgcagatcgaccccaattttggctccaaggaagattttgacagtctcttgcaatcggctaaaaaaaagagcatccgtgtcattctggaccttactcccaactaccggggtgagaactcgtggttctccactcaggttgacactgtggccaccaaggtgaaggatgctctggagttttggctgcaagctggcgtggatgggttccaggttcgggacatagagaatctgaaggatgcatcctcattcttggctgagtggcaaaatatcaccaagggcttcagtgaagacaggctcttgattgcggggactaactcctccgaccttcagcagatcctgagcctactcgaatccaacaaagacttgctgttgactagctcatacctgtctgattctggttctactggggagcatacaaaatccctagtcacacagtatttgaatgccactggcaatcgctggtgcagctggagtttgtctcaggcaaggctcctgacttccttcttgccggctcaacttctccgactctaccagctgatgctcttcaccctgccagggacccctgttttcagctacggggatgagattggcctggatgcagctgcccttcctggacagcctatggaggctccagtcatgctgtgggatgagtccagcttccctgacatcccaggggctgtaagtgccaacatgactgtgaagggccagagtgaagaccctggctccctcctttccttgttccggcggctgagtgaccagcggagtaaggagcgctccctactgcatggggacttccacgcgttctccgctgggcctggactcttctcctatatccgccactgggaccagaatgagcgttttctggtagtgcttaactttggggatgtgggcctctcggctggactgcaggcctccgacctgcctgccagcgccagcctgccagccaaggctgacctcctgctcagcacccagccaggccgtgaggagggctcccctcttgagctggaacgcctgaaactggagcctcacgaagggctgctgctccgcttcccctacgcggcctgacttcagcctgacatggacccactacccttctcctttccttcccaggccctttggcttctgatttttctcttttttaaaaacaaacaaacaaactgttgcagattatgagtgaacccccaaatagggtgttttctgccttcaaataaaagtcacccctgcatggtgaagtcttccctctgcttctctcaaaaaaaaaaa

SEQ ID NO: 62 - DNA, 4520 bp, Human
taggaacaggggagagtgcacctgctaccagtcaagctcagccagactgcaagaggaggcgaggcggagccagccgagggagtgaaccatggacaagttgaaatgcccgagtttcttcaagtgcagggagaaggagaaagtgtcggcttcatcagagaatttccatgttggtgaaaatgatgagaatcaggaccgtggtaactggtccaaaaaatcggattatcttctatctatgattggatacgcagtgggattaggaaatgtgtggagatttccatatctgacctacagcaatggtggaggcgccttcttgataccttatgcaattatgttagcattggctggtttacctttgttctttctggagtgttcactgggacaatttgctagcttaggtccagtttcagtttggaggattcttccattgtttcaaggtgtgggaattacaatggtcctgatctccatttttgtgacaatctattacaatgtcataattgcctatagtctttactacatgtttgcttcttttcaaagtgaactaccatggaaaaattgttcttcgtggtcagataaaaactgtagcagatcaccaatagtaactcactgtaatgtgagtacagtgaataaaggaatacaagagatcatccaaatgaataaaagctgggtagacatcaacaattttacctgcatcaacggcagtgaaatttatcagccagggcagcttcccagtgaacaatattggaataaagtggcgctccaacggtcaagtggaatgaatgagactggagtaattgtttggtatttagcactttgtcttcttctggcttggctcatagttggagcagcactatttaaaggaatcaaatcgtctggcaaggtggtatattttacagctcttttcccctatgtggtcctactcatcctgttagtacgaggtgcaactctggagggtgcttcaaaaggcatttcatactatattggagcccagtcaaattttacaaaacttaaggaagctgaggtatggaaagatgctgccactcagatattttactccctttcagtggcttggggtggcttagttgctctatcatcttacaataagttcaaaaacaactgcttctctgatgccattgtggtttgtttgacaaactgtctcactagcgtgtttgctggatttgctattttttctatattgggacacatggcccatatatctggaaaggaagtttctcaagttgtaaaatcaggttttgatttggcattcattgcctatccagaggctctagcccaactcccaggtggtccattttggtccatattattttttttcatgcttttaactttgggtctcgattctcagtttgcttcgattgaaacgatcacaacaacaattcaagatttatttcccaaagtgatgaagaaaatgagggttcccataactttgggctgctgcttggttttgtttctccttggtctcgtctgtgtgactcaggctggaatttactgggttcatctgattgaccacttctgtgctggatggggcattttaattgcagctatactggagctagttggaatcatctggatttatggagggaacagattcattgaggatacagaaatgatgattggagcaaagaggtggatattctggctatggtggagagcttgctggtttgtaattacgcctatccttttgattgcaatatttatctggtcattggtgcaatttcatagacctaattatggcgcaattccataccctgactggggagttgctttaggctggtgtatgattgttttctgcattatttggataccaattatggctatcataaaaataattcaggctaaaggaaacatctttcaacgccttataagttgctgcagaccagcttctaactggggtccatacctggaacaacatcgtggggaaagatataaagacatggtagatcctaaaaaagaggctgaccatgaaatacctactgttagtggcagcagaaaaccggaatgagatctcattgaaaaaaatatatgattgtataatgtgattttttttagaatagggggaaccttatttatttgtgtgttaactgaataggaaaatgtacatactatgttcatgatagtgtgatttttttcacatttaagcaggaatgcaatataaaaatgtgaatctcttaattctcagccatgtgcttattatatttctttttagattgtctatctgtataacacacacacacacacctaagagtctctatttcacaattatatttttgtaaatagtatatgcatttttaatacattggaggctttattttgaactaatttcttagagaatagttatattttctattacacaagtttaaaaatattattaacttgtattttcttaatatacaatctatcttttccacaaatatgagtgggaaataaatcagcacatttgaaagaaagtgttaaaactgaaggcctcacttaattagaaacgtgataaatatatggacaaatggactatacatactataagaggactgtagtttaatactttttacccaaatatgtttaaaaacatcgtgcatttgttacagctcatgttttctatatgaacttagtcattaatgttctttataaaaagtgaaataagatggaaaaattaggatcctacagccagtacgtgataaatctagaaaattgagttttgagtacctcttttcccatatacaatcttccttccttaggtaatttggaagaaaactatgacccatttaatttctattgtgtttcaccaaattcagtgttgttcattatacctctctgaaatataggtttaatttcaaatagaatatggacttaaatgttaatgagaaactggctttaatcaattctagcattttattactgtaatacagggctgatagagtgattttgtcttatatgagtcagttactacttacaggtgataacttgcatactattggaagataaagttgtcaaacttgtcaagaatgagaaaagccaaattagaaaatcctatgtcctagtttccttaccaaggataattaaatatatcactaagagctttatatattgattatatattgttgacaactggtttaagcatcatagcctatgatgataaacactgcctatatatgtaaatagcttttcatcaattcttaaatttcttaacctaggcttcagggagcatatgaaaccaaaattatatggaacattttctgtgtgtacatgtacatgcatttttctagggagagagtccgtaggtttatcagaatatcaaggaaaactgtgacccaaagaagtttaagaatcacatacagtgctgctggctttttgtgcttggcaaatgagtgacaatagaagaaataatttttcttacacattttaaaacgttttctcttccttgtgattgaagatgaaaggagtaagaaattaaggcatttgtttaatttatactggtaacttatttaggggggaggggacatgaaggtaggtaaataggtaggcctctaattgaaccacctctctaagttatgtacgtatatataagctgaaattgtgtttgacattctgagggttttctttttctttttcctttttttttttttttggtggggggctgggggtcagagtcttgttctgttgcctgggctggagtgcagtggcatgatctcagctcactgcaacctctgccttctggattcaagtgattctcctgcctcagcctcttgagtagctgggactacaggtgcccgccaccacaccagctaatttttgtatttttagtagaggcgaagtttccccatgttggccaggctggtcttgaactcccgacctcaagtgatctgtctacctcggcctcctaaagtgctgagattacaggtgtgagccaccgtgcccggcccattctaagggttttctttgaagacaggtcaaatgctgttagtaagtttcaggagattgttaattcctcagttataccagattttataaaatatttgagaatagatggctaacaagaggttagaaatacttttccttaattttaatccacagtatgttacatgcattctaccactacattttggtgctatttaaggtgtgcaattttctataggtgacttttgcaattcagggaagatttgggcatattaaatgaaagaatatctaattgggggaggtgtgaagggaaagaaattcttttcaaaagctgaccacaaagagtagttaaaagtttttgtcactatcttcacaagtgtgtaaagcacagatttcaacagagtgcttggcatattgtagggtgctcaatggtggtttttattattattactcagattccacagtggcaagaaacatcattctacataatggaaaacatttacatcaaatcccacttactttaatgcgaacttggagataatttatggtattgtattgtaaaccattaatgaaaactttttcacagttgagtgaaattaaaatcactatatctc

SEQ ID NO: 63 - DNA, 4543 bp, Human
cggcgggcggcgcgcacactgctcgctgggccgcggctcccgggtgtcccaggcccggccggtgcgcagagcatggcgggtgcgggcccgaagcggcgcgcgctagcggcgccggcggccgaggagaaggaagaggcgcgggagaagatgctggccgccaagagcgcggacggctcggcgccggcaggcgagggcgagggcgtgaccctgcagcggaacatcacgctgctcaacggcgtggccatcatcgtggggaccattatcggctcgggcatcttcgtgacgcccacgggcgtgctcaaggaggcaggctcgccggggctggcgctggtggtgtgggccgcgtgcggcgtcttctccatcgtgggcgcgctctgctacgcggagctcggcaccaccatctccaaatcgggcggcgactacgcctacatgctggaggtctacggctcgctgcccgccttcctcaagctctggatcgagctgctcatcatccggccttcatcgcagtacatcgtggccctggtcttcgccacctacctgctcaagccgctcttccccacctgcccggtgcccgaggaggcagccaagctcgtggcctgcctctgcgtgctgctgctcacggccgtgaactgctacagcgtgaaggccgccacccgggtccaggatgcctttgccgccgccaagctcctggccctggccctgatcatcctgctgggcttcgtccagatcgggaagggtgatgtgtccaatctagatcccaacttctcatttgaaggcaccaaactggatgtggggaacattgtgctggcattatacagcggcctctttgcctatggaggatggaattacttgaatttcgtcacagaggaaatgatcaacccctacagaaacctgcccctggccatcatcatctccctgcccatcgtgacgctggtgtacgtgctgaccaacctggcctacttcaccaccctgtccaccgagcagatgctgtcgtccgaggccgtggccgtggacttcgggaactatcacctgggcgtcatgtcctggatcatccccgtcttcgtgggcctgtcctgcttcggctccgtcaatgggtccctgttcacatcctccaggctcttcttcgtggggtcccgggaaggccacctgccctccatcctctccatgatccacccacagctcctcacccccgtgccgtccctcgtgttcacgtgtgtgatgacgctgctctacgccttctccaaggacatcttctccgtcatcaacttcttcagcttcttcaactggctctgcgtggccctggccatcatcggcatgatctggctgcgccacagaaagcctgagcttgagcggcccatcaaggtgaacctggccctgcctgtgttcttcatcctggcctgcctcttcctgatcgccgtctccttctggaagacacccgtggagtgtggcatcggcttcaccatcatcctcagcgggctgcccgtctacttcttcggggtctggtggaaaaacaagcccaagtggctcctccagggcatcttctccacgaccgtcctgtgtcagaagctcatgcaggtggtcccccaggagacatagccaggaggccgagtggctgccggaggagcatgcgcagaggccagttaaagtagatcacctcctcgaacccactccggttccccgcaacccacagctcagctgcccatcccagtccctcgccgtccctcccaggtcgggcagtggaggctgctgtgaaaactctggtacgaatctcatccctcaactgagggccagggacccaggtgtgcctgtgctcctgcccaggagcagcttttggtctccttgggccctttttcccttccctcctttgtttacttatatatatattttttttaaacttaaattttgggtcaacttgacaccactaagatgattttttaaggagctgggggaaggcaggagccttcctttctcctgccccaagggcccagaccctgggcaaacagagctactgagacttggaacctcattgctaccacagacttgcactgaagccggacagctgcccagacacatgggcttgtgacattcgtgaaaaccaaccctgtgggcttatgtctctgccttagggtttgcagagtggaaactcagccgtagggtggcactgggagggggtgggggatctgggcaaggtgggtgattcctcccaggaggtgcttgaggccccgatggactcctgaccataatcctagccccgagacaccatcctgagccagggaacagccccagggttggggggtgccggcatctcccctagctcaccaggcctggcctctgggcagtgtggcctcttggctatttctgtgtccagttttggaggctgagttctggttcatgcagacaaagccctgtccttcagtcttctagaaacagagacaagaaaggcagacacaccgcggccaggcacccatgtgggcgcccaccctgggctccacacagcagtgtcccctgccccagaggtcgcagctaccctcagcctccaatgcattggcctctgtaccgcccggcagccccttctggccggtgctgggttcccactcccggcctaggcacctccccgctctccctgtcacgctcatgtcctgtcctggtcctgatgcccgttgtctaggagacagagccaagcactgctcacgtctctgccgcctgcgtttggaggcccctgggctctcacccagtccccacccgcctgcagagagggaactagggcaccccttgtttctgttgttcccgtgaatttttttcgctatgggaggcagccgaggcctggccaatgcggcccactttcctgagctgtcgctgcctccatggcagcagccagggacccccagaacaagaagaccccgcaggatccctcctgagctcggggggctctgccttctcaggccccgggcttcccttctccccagccagaggtggagccaagtggtccagcgtcactccagtgctcagctgtggctggaggagctggcctgtggcacagccctgagtgtcccaagccgggagccaacgaagccggacacggcttcactgaccagcggctgctcaagccgcaagctctcagcaagtgcccagtggagcctgccgcccccgcctgggcaccgggaccccctcaccatccagtgggcccggagaaacctgatgaacagtttggggactcaggaccagatgtccgtctctcttgcttgaggaatgaagacctttattcacccctgccccgttgcttcccgctgcacatggacagacttcacagcgtctgctcataggacctgcatccttcctggggacgaattccactcgtccaagggacagcccacggtctggaggccgaggaccaccagcaggcaggtggactgactgtgttgggcaagacctcttccctctgggcctgttctcttggctgcaaataaggacagcagctggtgccccacctgcctggtgcattgctgtgtgaatccaggaggcagtggacatcgtaggcagccacggccccgggtccaggagaagtgctccctggaggcacgcaccactgcttcccactggggccggcggggcccacgcacgacgtcagcctcttaccttcccgcctcggctaggggtcctcgggatgccgttctgttccaacctcctgctctgggacgtggacatgcctcaaggatacagggagccggcggcctctcgacggcacgcacttgcctgttggctgctgcggctgtgggcgagcatgggggctgccagcgtctgttgtggaaagtagctgctagtgaaatggctggggccgctggggtccgtcttcacactgcgcaggtctcttctgggcgtctgagctggggtgggagctcctccgcagaaggttggtggggggtccagtctgtgatccttggtgctgtgtgccccactccagcctggggaccccacttcagaaggtaggggccgtgtcccgcggtgctgactgaggcctgcttccccctccccctcctgctgtgctggaattccacagggaccagggccaccgcaggggactgtctcagaagacttgatttttccgtccctttttctccacactccactgacaaacgtccccagcggtttccacttgtgggcttcaggtgttttcaagcacaacccaccacaacaagcaagtgcattttcagtcgttgtgcttttttgttttgtgctaacgtcttactaatttaaagatgctgtcggcaccatgtttatttatttccagtggtcatgctcagccttgctgctctgcgtggcgcaggtgccatgcctgctccctgtctgtgtcccagccacgcagggccatccactgtgacgtcggccgaccaggctggacaccctctgccgagtaatgacgtgtgtggctgggaccttctttattctgtgttaatggctaacctgttacactgggctgggttgggtagggtgttctggcttttttgtggggtttttatttttaaagaaacactcaatcatccta

SEQ ID NO: 64 - DNA, 9648 bp, Human
ggtttgtaatgatagggcggcagcagcagcagcagcagcagtggtggaacgaggaggtggagaattgagagcacgatgcatacacaggtgtttctgagtagtaattagatcgctgtgaaggaaaaagcacacctttgagttttcacctgtgaacactatagcgctgagagagacagtctgaaagcagaggaagacatcgatcagtaacaccaagagacaccaaagttgaaagttttgttttctttccctctgttttatttttcccccgtgtgtccctactatggtcagaaagcctgttgtgtccaccatctccaaaggaggttacctgcagggaaatgttaacgggaggctgccttccctgggcaacaaggagccacctgggcaggagaaagtgcagctgaagaggaaagtcactttactgaggggagtctccattatcattggcaccatcattggagcaggaatcttcatctctcctaagggcgtgctccagaacacgggcagcgtgggcatgtctctgaccatctggacggtgtgtggggtcctgtcactatttggagctttgtcttatgctgaattgggaacaactataaagaaatctggaggtcattacacatatattttggaagtctttggtccattaccagcttttgtacgagtctgggtggaactcctcataatacgccctgcagctactgctgtgatatccctggcatttggacgctacattctggaaccattttttattcaatgtgaaatccctgaacttgcgatcaagctcattacagctgtgggcataactgtagtgatggtcctaaatagcatgagtgtcagctggagcgcccggatccagattttcttaaccttttgcaagctcacagcaattctgataattatagtccctggagttatgcagctaattaaaggtcaaacgcagaactttaaagacgccttttcaggaagagattcaagtattacgcggttgccactggctttttattatggaatgtatgcatatgctggctggttttacctcaactttgttactgaagaagtagaaaaccctgaaaaaaccattccccttgcaatatgtatatccatggccattgtcaccattggctatgtgctgacaaatgtggcctactttacgaccattaatgctgaggagctgctgctttcaaatgcagtggcagtgaccttttctgagcggctactgggaaatttctcattagcagttccgatctttgttgccctctcctgctttggctccatgaacggtggtgtgtttgctgtctccaggttattctatgttgcgtctcgagagggtcaccttccagaaatcctctccatgattcatgtccgcaagcacactcctctaccagctgttattgttttgcaccctttgacaatgataatgctcttctctggagacctcgacagtcttttgaatttcctcagttttgccaggtggctttttattgggctggcagttgctgggctgatttatcttcgatacaaatgcccagatatgcatcgtcctttcaaggtgccactgttcatcccagctttgttttccttcacatgcctcttcatggttgccctttccctctattcggacccatttagtacagggattggcttcgtcatcactctgactggagtccctgcgtattatctctttattatatgggacaagaaacccaggtggtttagaataatgtcagagaaaataaccagaacattacaaataatactggaagttgtaccagaagaagataagttatgaactaatggacttgagatcttggcaatctgcccaaggggagacacaaaatagggatttttacttcattttctgaaagtctagagaattacaactttggtgataaacaaaaggagtcagttatttttattcatatattttagcatattcgaactaatttctaagaaatttagttataactctatgtagttatagaaagtgaatatgcagttattctatgagtcgcacaattcttgagtctctgatacctacctattggggttaggagaaaagactagacaattactatgtggtcattctctacaacatatgttagcacggcaaagaaccttcaaattgaagactgagatttttctgtatatatgggttttgtaaagatggttttacacactatagatgtctatactgtgaaaagtgttttcaattctgaaaaaaagcatacatcatgattatggcaaagaggagagaaagaaatttattttacattgacattgcattgcttccccttagataccaatttagataacaaacactcatgctttaatggattatacccagagcactttgaacaaaggtcagtggggattgttgaatacattaaagaagagtttctaggggctactgtttatgagacacatccaggagttatgtttaagtaaaaatccttgagaatttattatgtcagatgttttttcattcattatcaggaagttttagttatctgtcatttttttttttcacatcagtttgatcaggaaagtgtataacacatcttagagcaagagttagtttggtattaaatcctcattagaacaaccacctgtttcactaataacttacccctgatgagtctatctaaacatatgcattttaagccttcaaattacattatcaacatgagagaaatcaccaacaaagaagatgttcaaaataatagtcccatatctgtaatcatatctacatgcaatgttagtaattctgaagttttttaaatttatggctatttttacacgatgatgaattttgacagtttgtgcattttctttatacattttatattcttctgttaaaatatctcttcagatgaaactgtccagattaattaggaaaaggcatatattaacataaaaattgcaaaagaaatgtcgctgtaaataagatttacaactgatgtttctagaaaatttccacttctatatctaggctttgtcagtaatttccacaccttaattatcattcaacttgcaaaagagacaactgataagaagaaaattgaaatgagaatctgtggataagtgtttgtgttcagaagatgttgttttgccagtattagaaaatactgtgagccgggcatggtggcttacatctgtaatcccagcactttgggaggctgagggggtggatcacctgaggtcgggagttctagaccagcctgaccaacatggagaaaccccatctctactaaaaatacaaaattagctgggcatggtggcacatgctggtaatctcagctattgaggaggctgaggcaggagaattgcttgaacccgggaggcggaggttgcagtgagccaagattgcaccactgtactccagcctgggtgacaaagtcagactccatctccaaaaaaaaaagattatatatatatatatatgtgtgtgtatgtgtgtgtgtgtgtgtgtgtgtatatatatatatatatatatacacacacacacacacactttttatatatatatatatatatatatagtggaacttacaaatgagagtaatataatgatgaaattttgaactgttatttataaacatctaaggtaaaatggttagtcatggccagagtatgtttcatcctttaatttttgtccatttgaaaataaggatttttgaaagaattataccaattaaaattattaaaggcaaacatagaattcataaaaaattgtccaaagtagaaatgatgacctataatttggagcatttccaattcagtaatttcaattttgctcttgaaaacatttaatatatatccaagactgacatttctttagctgaacctaacgtttgggtctctgagtgaatttataataactccttccttccttagcatagggttttcaaaatttgatttataattcctatttccagtaaatattgttcatttgtccacatctctccctatgatatgttgctggaggtaagaatttctttcatattcctattttttttttccccatagactaggctcatagaatttaaacaagcaaattttcctgagctttttcttgccaaatgaaagaagactggtaaattctcatagagaggtttgtgtagttcttggctcttcctggggttaatgtgcttatattcacagtggcaaattggtctcagactttaatttatttatttttgatttgaatttctctttaaaagtatcaatttaaaaggtaactagaattattctttctcattttcaaaagtgatttttgcattattaaatttccctgccattgtaatgccatttcacgcagaaaaaaagtcagccagtaattaagaaaaaaagtgatggagattaagtagtattttggcttatttttaggactcatcatgagaagacacagttcctttaatcaggaaattaatatccataattttcactcaaaattgcagtatgtaaagcagattctcaaaaactctcctgaacacttatttatatatatgtttttatataagtaaaatttttctcatatttttatacgatatgcacacacacacatacatgcacatactacttactacatgttctgtacttgtactttgtaccatgcatattcaaatgtttatatacataagtttattataacataaacagtaaaagtaatgaatactgtttaaaataactaatatagtattttttaatttttgtggggatggattctcaaatacttgtgattttaaaagattctaaagctaaaacacaacttgattttaaaaagaatgattctccttacacaattataaatatttgcagtaaatattttccttataatactgttttgaccccatttaaaaagtattagattatattcctttgatccaatgaaaactgaaccttataaatggttagctgaaagtagaccttattcttgtccttctttagaagagtaaagatttgtcctagggaagatggctgacttcggttcccaacatgcgtatgcatttagactgtagctcctcagccctgtggacacaaaatttggacagcttattaggttacgttagcaatgcatgacggtttctccaacactaagatattcacgttgaaacagatttcctgttcgtcttatgtgtctggtaaaattgtttccccaattacaatttgacatatcaatagagggttaacaagagtataattacataacagaattcctcatgaactgtaatcagtctacaggaaaatcattattttatcttgatttgcagatgaatatactgctaagaaagggagcaactctgacctttgttaaagttgatcttttgtaattgaggtataaggtatgaaaagataaaaaaccgaaggccagagaatcaggaaatgaaagatagtatggactgaaggtaacaatattttaatgttatgcaatatagtcagagaaatattaaaaattagttgtttgctgtgcataggtggatctcgcaggaagctaatgaaacctaagcttcagtgcctctcacttagacatgttccattcgaggtcctgaacctaactttgtattaggaattctgtactaattttgttgaagaagaccagcaaagttgtgtacacttctacccccacaaaatctgcattgtccatgtgagtaaagtaaaataattcctgttatttttttctgttagaaataagtatggaggatatgtttttaaaaatttatgagttaattgaaatatccatatataacaagtgactttctcacaatatatatgatgtgatatatagggagatagtttcactttcatcatattttatacgttgattctgaactatagaaaaataataaatgggattttaattatagctcttagttgggaaagaaatatagagagatgtgggatttgaatgcccatgaaagacattttattttacttgaatatattcttgcttcactttaccctccataatatgttgtacattagtgctgatcaagtttacagagttacattttgctttcctaaccattcagtcaggaattaaaatatggcattgtataacaactgggaagaagctcatagtggatataaattagagtagataatgggtcaccttgatagcctctgtttacattacttgtatatgggcaaaataattattacctatacgtgtatttaagcttaattttcatataaacagtatttttaatctatgttaaaatagataatatctaaaagtgtgatctctaggtagtccttagtttattagtactgtacttcaaaaagatttttaaataggtccggcacggtggctcatgcctgtaatcccagcactttgggaggctgaggcgggcgaatcacctgaggtcaggagttcgagatcagcctggccaacatggtgaaaccctgtctcaactaaaaatataaaaattagccgggcgtggtggcaggcgcctgtaatcccagctactcgggaggctgaggcaggagaatcacttgaacccaaggggcagaagctgcagttagccaagatcgcatcattgcactccagcctaggggacaagagcgcgagacttcatctcaaaaaaaaaaaaaaaaaaaaaaaaagatttttaaataatagctaaaggtatgctctctaggtcatccttagtttattagtactgtacttaaaaattattttttaatagtcaattttgggagataattatttctttccttatattttccaattagttggtgtctaaaaataaatgttttgtctaattttagatcaggtatacattcacaaaagcataaatcatagtctcacaggaaattcaccaattttccatatgtcgtgagataactgtcctttctacaacctcataacaatgaatttatataattacctagattttcttagtgtgaatctacccattagttttattttcttggtagttatttttttccctcctctctgttactattggccttaaaatacacagaggacggttacagtgtcctaatagctgttacatgtgtgtgtttcagcgtacttgaatcaagtgtacatttatagtaccaataaccgcctttacagctttacagttaacaattctctcacaaaactgtagagcattaggcatctgagagccatagagggccaactttgttccagagtgaacatgctttttttcctcaacatatacactactgattttttttaaaagtatgactttcaagtgaattaatgtattggttaggagaactgcttgctaagtccttattacctcttgttaaagcctcagaaggccgtgctgaaagccagaggggaaaaaaagagtaatgcacaggtatctcttttgcagtggtgactgtattttgagtaccttgtgtgacagggtattattacagcatcttgtgggaaaacctattaggcctttgcatgttaaagctgtataatttgttgggttgtgagtggtctgacttaaatgtgtattataaaatttagacatcaaattttcctactaactaactttattagatgcatacttggaagcacagtcatatcacactgggaggcaatgcaatgtggttacctggtcctaggtttgaactgtcttatttcaaaagatttctgaattaatttttccctagaatttctccttcattccaaagtacaaacatactttgaagaatgaaacagattgttcccatgaatgtatgctcatactcgactagaaacgatctatgttaaatgactgtgtatatgaattatttcaagtactaccccaaataactttcttattgctctgaaagaagaaaagcaatgtaaatcactatgattattgcacaaacaaccagaattctccaacaattttaagtaatctgatcctcttcttggagaaaattgttacctaatagtttttccttatgaatgttattactactggtataaatcaaatttctataaatttcctacttaagtcttaagaactgggttcttcctttgatgttattcatgttcagaaaggaaacaacactttactcttttaggacaattcctagaatctatagtagtatcaggatatattttgctttaaaatatattttggttattttgaatacagacattggctccaaattttcatctttgcacaatagtatgacttttcactagaacttctcaacatttgggaactttgcaaatatgagcatcatatgtgttaaggctgtatcatttaatgctatgagatacattgttttctccctatgccaaacaggtgaacaaacgtagttgttttttactgatactaaatgttggctacctgtgattttatagtatgcacatgtcagaaaaaggcaagacaaatggcctcttgtactgaatacttcggcaaacttattgggtcttcattttctgacagacaggatttgactcaatatttgtagagcttgcgtagaatggattacatggtagtgatgcactggtagaaatggtttttagttattgactcagaattcatctcaggatgaatcttttatgtctttttattgtaagcatatctgaatttactttataaagatggttttagaaagctttgtctaaaaatttggcctaggaatggtaacttcattttcagttgccaaggggtagaaaaataatatgtgtgttgttatgtttatgttaacatattattaggtactatctatgaatgtatttaaatatttttcatattctgtgacaagcatttataatttgcaacaagtggagtccatttagcccagtgggaaagtcttggaactcaggttacccttgaaggatatgctggcagccatctctttgatctgtgcttaaactgtaatttatagaccagctaaatccctaacttggatctggaatgcattagttatgaccttgtaccattcccagaatttcaggggcatcgtgggtttggtctagtgattgaaaacacaagaacagagagatccagctgaaaaagagtgatcctcaatatcctaactaactggtcctcaactcaagcagagtttcttcactctggcactgtgatcatgaaacttagtagaggggattgtgtgtattttatacaaatttaatacaatgtcttacattgataaaattcttaaagagcaaaactgcattttatttctgcatccacattccaatcatattagaactaagatatttatctatgaagatataaatggtgcagagagactttcatctgtggattgcgttgtttcttagggttcctagcactgatgcctgcacaagcatgtgatatgtgaaataaaatggattcttctatagctaaatgagttccctctggggagagttctggtactgcaatcacaatgccagatggtgtttatgggctatttgtgtaagtaagtggtaagatgctatgaagtaagtgtgtttgttttcatcttatggaaactcttgatgcatgtgcttttgtatggaataaattttggtgcaatatgatgtcattcaactttgcattgaattgaattttggttgtatttatatgtattatacctgtcacgcttctagttgcttcaaccattttataaccatttttgtacatattttacttgaaaatattttaaatggaaatttaaataaacatttgatagtttacataataa

SEQ ID NO: 65 - DNA, 2525 bp, Human
gcttcgcagacctctggcgcccggcgggttcccagttcccccgcttcttccgaggagacagcggaggcgaggccaccgggctgtcaggctgaagctccgtggcggccgggtcctgcacgcagagaagaccccagcgccggcgcggctcagggctgggcccacgggactccggacgcgccgcgaaagcgttgcgctcccggaggcgtccgcagctgctggctgctcatttgccggtgaccggaggctcggggccagcatggcccccacgctgcaacaggcgtaccggaggcgctggtggatggcctgcacggctgtgctggagaacctcttcttctctgctgtactcctgggctggggctccctgttgatcattctgaagaacgagggcttctattccagcacgtgcccagctgagagcagcaccaacaccacccaggatgagcagcgcaggtggccaggctgtgaccagcaggacgagatgctcaacctgggcttcaccattggttccttcgtgctcagcgccaccaccctgccactggggatcctcatggaccgctttggcccccgacccgtgcggctggttggcagtgcctgcttcactgcgtcctgcaccctcatggccctggcctcccgggacgtggaagctctgtctccgttgatattcctggcgctgtccctgaatggctttggtggcatctgcctaacgttcacttcactcacgctgcccaacatgtttgggaacctgcgctccacgttaatggccctcatgattggctcttacgcctcttctgccattacgttcccaggaatcaagctgatctacgatgccggtgtggccttcgtggtcatcatgttcacctggtctggcctggcctgccttatctttctgaactgcaccctcaactggcccatcgaagcctttcctgcccctgaggaagtcaattacacgaagaagatcaagctgagtgggctggccctggaccacaaggtgacaggtgacctcttctacacccatgtgaccaccatgggccagaggctcagccagaaggcccccagcctggaggacggttcggatgccttcatgtcaccccaggatgttcggggcacctcagaaaaccttcctgagaggtctgtccccttacgcaagagcctctgctcccccactttcctgtggagcctcctcaccatgggcatgacccagctgcggatcatcttctacatggctgctgtgaacaagatgctggagtaccttgtgactggtggccaggagcatgagacaaatgaacagcaacaaaaggtggcagagacagttgggttctactcctccgtcttcggggccatgcagctgttgtgccttctcacctgccccctcattggctacatcatggactggcggatcaaggactgcgtggacgccccaactcagggcactgtcctcggagatgccagggacggggttgctaccaaatccatcagaccacgctactgcaagatccaaaagctcaccaatgccatcagtgccttcaccctgaccaacctgctgcttgtgggttttggcatcacctgtctcatcaacaacttacacctccagtttgtgacctttgtcctgcacaccattgttcgaggtttcttccactcagcctgtgggagtctctatgctgcagtgttcccatccaaccactttgggacgctgacaggcctgcagtccctcatcagtgctgtgttcgccttgcttcagcagccacttttcatggcgatggtgggacccctgaaaggagagcccttctgggtgaatctgggcctcctgctattctcactcctgggattcctgttgccttcctacctcttctattaccgtgcccggctccagcaggagtacgccgccaatgggatgggcccactgaaggtgcttagcggctctgaggtgaccgcatagacttctcagaccaagggacctggatgacaggcaatcaaggcctgagcaaccaaaaggagtgccccatatggcttttctacctgtaacatgcacatagagccatggccgtagatttataaataccaagagaagttctatttttgtaaagactgcaaaaaggaggaaaaaaaaccttcaaaaacgccccctaagtcaacgctccattgactgaagacagtccctatcctagaggggttgagctttcttcctccttgggttggaggagaccagggtgcctcttatctccttctagcggtctgcctcctggtacctcttggggggatcggcaaacaggctacccctgaggtcccatgtgccatgagtgtgcacacatgcatgtgtctgtgtatgtgtgaatgtgagagagacacagccctcctttcagaaggaaaggggcctgaggtgccagctgtgtcctgggttaggggttgggggtcggccccttccagggccaggagggcaggttccctctctggtgctgctgcttgcaagtcttagaggaaataaaaagggaagtgagagaaaaaaaaaaaaaaaaaaaaaaaaaaaa

SEQ ID NO: 66 - DNA, 3965 bp, Human
ccacgcgtccgcacggaggatcgcgggaggctgccgcctcgggacaccccactcacacagagctgacgcaagttggacagaaggaggtgttggggtgaggtggtggtgttgattggcttgtctcgttcactcccactggtctttaaatcaatgtctagatctctaaagtttcatataaatcaaagctgttacacgggtctgccattccaaacaagtcaggaaagcctgcacaggactggataaataattaagaacagagtgttctgaacatcaacacaaagtggaagaaccttaagctgaaggtacagtatattatttacactgaaggggcttgtgtgtggacaagaaagcgctgacagctcaaatggatcccatggaactgagaaatgtcaacatcgaaccagatgatgagagcagcagtggagaaagtgctccagatagctacatcgggataggaaattcagaaaaggcagcaatgagcagtcaatttgctaatgaagacactgaaagtcagaaattcctgacaaatggatttttggggaaaaagaagctggcagattatgctgatgaacaccatcccggaaccacttcctttggaatgtcttcatttaacctgagtaatgccatcatgggcagtgggatcctgggcttgtcctatgccatggccaacacagggatcatactttttataatcatgctgcttgctgtggcaatattatcactgtattcagttcaccttttattaaaaacagccaaggaaggagggtctttgatttatgaaaaattaggagaaaaggcatttggatggccgggaaaaattggagcttttgtttccattacaatgcagaacattggagcaatgtcaagctacctctttatcattaaatatgaactacctgaagtaatcagagcattcatgggacttgaagaaaatactggagaatggtacctcaatggcaactacctcatcatatttgtgtctgttggaattattcttccactttcgctccttaaaaatttaggttatcttggctataccagtggattttctcttacctgcatggtgttttttgttagtgtggtgatttacaagaaattccaaataccctgccctctacctgttttggatcacagtgttggaaatctgtcattcaacaacacgcttccaatgcatgtggtaatgttacccaacaactctgagagttctgatgtgaacttcatgatggattacacccaccgcaatcctgcagggctggatgagaaccaggccaagggctctcttcatgacagtggagtagaatatgaagctcatagtgatgacaagtgtgaacccaaatactttgtattcaactcccggacggcctatgcaattcctatcctagtatttgcttttgtatgccaccctgaggtccttcccatctacagtgaacttaaagatcggtcccggagaaaaatgcaaacggtgtcaaatatttccatcacggggatgcttgtcatgtacctgcttgccgccctctttggttacctaaccttctatggagaagttgaagatgaattacttcatgcctacagcaaagtgtatacattagacatccctcttctcatggttcgcctggcagtccttgtggcagtaacactaactgtgcccattgtcctcttcccaattcgtacatcagtgatcacactgttatttcccaaacgacccttcagctggatacgacatttcctgattgcagctgtgcttattgcacttaataatgttctggtcatccttgtgccaactataaaatacatcttcggattcataggggcttcttctgccactatgctgatttttattcttccagcagttttttatcttaaacttgtcaagaaagaaacttttaggtcaccccaaaaggtcggggctttaattttccttgtggttggaatattcttcatgattggaagcatggcactcattataattgactggatttatgatcctccaaattccaagcatcactaacacaaggaaaaatactttctttttctattggaaatggttacaagttatactccaaaagatatttgaattatcttgattggaatgttattcataggaaataacaggaagattccaaagacgtttaccagtaatatcaccaggcacctgcagaagaggaaaatcactgtttttgtcaaggatggttgtgtatgtgtttaaaataaaacctgtggtgcacatttctacccaggttttgctagagcagtgtgagatgatgaaggtgtatttttgctgctttacgagcagaataagggtaactgcatgtaacaatcatcagatagtactctttcccctgccgtctcctcatcctgcaccccctaaaaaagtaccaaacatttgcattctcagaacatcaaacaaaaatgccctggtggcaaagctatcaccatttaatgtcttctctcagtcttgcaccaaagtctctggtctgtttactaacagaggcaaaaggcatgtcttaggaactgtttctgtttctgtaaggtacatgaatggtcaaacaccagtctagagcatcttattgtcaacagcaaaataatattttgcccaccctgtttgtgacattgagttgtgacttctatattcaatagatttttgtaaatgttaaaacatctatatttaaatgttaaaacactaaatatagagaggggctttatttcaatcatagagcaacaacaaaaataatgcttatagctaaactgcctgttctagaaagcatctgctttttcatgttattcctaaatcctcttgtcatacttttgtcattgaacaatgctctccctctcgtcttccatcctcattcagaatttttagaagaccacaatcgtggagatacactacccagtattgtttgatacatttttatttgataaacattcagtgcaggaaactgtgatttgctatatgtttatgtatataatcttattctgtagtcatcagaatgttaatgtaaggtacatttgatttttattttttacatgtgtagttttctttcttcacagtcaaagcatttatattattgggggtgggggcagggaattaagttggtgggctcgaaaatcccattcatatgtatctgtctacaaatgtctggggataatttaaatttgaaacctaagttatatatagtttggcaatgctcttcttcaatatttacaataataggatgatctacaagaaaataagtttctttttgcaaatttttatcatactaaagttgttcttttaatttagcatatctaaaataggaattagttcagtttagctcacacaggtgtttgctgacattcattggccatttaatacagtgttgagtggttctccgtaaaagtataagtgctaacactacgaagaaatgcacacgatcattcttgctcacttctataacaaacttacataaaatggatttaaaaattcctactcacagcctaaaacttctggagttcactacctttttttcaaatcatagtaagatcacttgtgtattttatattttagtaaagccaattatgaagtacaagtatcatacacgtacttttgagctactattatttgaaaaaaatctgccaaatagcatctttaggatatatttacattttcactcatctaaaaagtatacaaaaataaaaagtggaaaaaggtatcttctgaatgttcaagagcatcctatagtgccaaataataaagcaccatttttttcttcataaccaggattaaaattcatatatactgcagggcagacatacatatgatagcttgtgctgattaatttaaccccatttgtaaacagatgaaaattttattttcttatttcatttataagatggctcaatgtattgggaggcttcttttttattacagaaagtgtatattggtatataataaatgaacttttcaaatgacaaaaaaaaaaaaaaaa

SEQ ID NO: 67 - DNA, 2667 bp, Human
gcctggaatagcctggctactacccctgcacctgttcccctgctgtccccaggcctctctgcctgaatctgcctctctctgcctcttttctcctgtccctccaggagtctctctgcctcaaccactctctctgccccttcatctctctgagctggtgtgtctggtcctaccctctgtttggggagctgtctggctctgtcccccacctcttggccagcctgtgtctcctgtctatgactgagcccaattgcctgttgcctttctgcaggtgtttccacgagcctatccctacccacctgtttgtttctgagtctgcctgtgtgtccctttctccctgtctctgcctgtcttccaagctcccctagcatcccctcctcccgcccatctgtctttctgtcccttctgtggtctgtctgttcctgtgctgtttctcatgcctgctttctttgtaacttcagttctcctactctctctctgtctcctctctgcacctttttctgccatccatcccatcctgctgtccgtctgctctgtgagtcatcccctctgtctgcctgtcactctctctagctgtgggtctacaccctcaatctttcaggccatttcccccaccatcaacacacaaacaaaccgctgtctccctccaagtgggtccagatagggggcgccccttctccacctcttcccccgcccagggccagaaggagggaaacgaaattaaaattaacatttcttctcaggaaaaaaaaaaaagtaccgctccagagcaggagcctaggcagccgagagggtgcccgaacctgagtctgagttgcggccacttcaggagctgagaggagcaggatggaactgcaggatccaaagatgaatggagccctcccttcggatgctgtgggctacaggcaagaacgtgagggcttcctgcccagtcgtggtcctgctcctgggagcaagccggtccagttcatggatttcgaggggaagacatcgtttggaatgtcagtgttcaacctcagcaacgccatcatgggcagcggcatcctggggctggcctatgccatggcccacacgggggtcatcttcttcctggccctgctgctgtgcattgcgcttctgtcgtcctactccatccacctcctgctgacctgtgctggtattgcaggcatccgagcctatgagcagctgggacagagggcattcgggcctgcggggaaggtagtggtggccacagtcatctgtctgcacaatgttggggccatgtccagttacctgttcatcatcaaatctgagctccccctggttatcggcaccttcctgtacatggaccccgagggggactggttcttgaagggaaacctcctcatcatcatcgtcagtgtgttaatcatcctgcccctcgccctcatgaaacacttgggctacctggggtacaccagtggtctctctctgacctgcatgctgtttttccttgtttcggtcatctacaagaagttccaacttggctgtgctataggccacaatgaaacagcaatggagagtgaagctctcgtgggactccccagccaaggactcaacagcagctgtgaggcccagatgttcacagttgactcacagatgtcctacacagtgcccattatggcttttgcttttgtctgccaccctgaggtgctgcccatctatacggagctctgccggccctccaagcgcaggatgcaggccgtggccaacgtgtccattggggccatgttctgcatgtatgggctcacagcaacctttggatacctcaccttctacagcagtgtgaaggcggagatgctgcacatgtacagccagaaggacccgctcatcctctgtgtgcgcctggccgtgctgctcgcggtgaccctcactgtgccagtcgtgctgttccctatccgccgggccctgcagcagctgcttttcccaggcaaggccttcagctggccacgacatgtggccatagctctgatcctgcttgttttggtcaatgtccttgtcatctgtgtgccaaccatccgggatatctttggagttatcgggtccacctcagcccccagcctcatcttcatcctccccagcatcttctacctccgcattgtaccctctgaggtggagcctttcttatcctggcccaagatccaggccctgtgctttggagtcctgggagtcctcttcacggccgtcagtctaagctttatgtttgccaactgggccacaagccagagccgcatgtctggacactgataaggcctgctggcccaggtccctgtgcgcatgcacatggaggggtcagggccgctccctagggtccctcctgcccaacatgtggaggtggctggttcccatgaacgtggttgtcagaggcgggggacagcagaggctgcagactggcccacttccctcctccccagggatgccaagcttggatcatggccctaatcccaaccccaaccccatgggaggaggaggaagaagaggaggaggaggaggaggaggaggaggaggaggaggccaggtcctggtggagcctttgcccagcccagtcctctctgcctcctcctggctgaagctgtttgtcaggattaccctcgggctaaagaggaaaaataaagatgttgagctaccaaaaaaaaaaaaaaaaaaaaaaaa

SEQ ID NO: 68 - DNA, 3162 bp, Human
gcgccctagccctctttcggggatactggccgaccccctcttccttttcccctttagtgaaggcctcccccgtcgccgcgcggcttcccggagccgactgcagactccctcagcccggtgttccccgcgtccggacgccgaggtcgcggcttcgcagaaactcgggcccctccatccgccctcagaaaagggagcgatgttgatctcaggaagcacaaagggaccttcctagctctgactgaaccacggagctcaccctggacagtatcactccgtggaggaagactgtgagactgtggctggaagccagattgtagccacacatccgcccctgccctaccccagagccctggagcagcaactggctgcagatcacagacacagtgaggatatgagtgtaggggtgagcacctcagcccctctttccccaacctcgggcacaagcgtgggcatgtctaccttctccatcatggactatgtggtgttcgtcctgctgctggttctctctcttgccattgggctctaccatgcttgtcgtggctggggccggcatactgttggtgagctgctgatggcggaccgcaaaatgggctgccttccggtggcactgtccctgctggccaccttccagtcagccgtggccatcctgggtgtgccgtcagagatctaccgatttgggacccaatattggttcctgggctgctgctactttctggggctgctgatacctgcacacatcttcatccccgttttctaccgcctgcatctcaccagtgcctatgagtacctggagcttcgattcaataaaactgtgcgagtgtgtggaactgtgaccttcatctttcagatggtgatctacatgggagttgtgctctatgctccgtcattggctctcaatgcagtgactggctttgatctgtggctgtccgtgctggccctgggcattgtctgtaccgtctatacagctctgggtgggctgaaggccgtcatctggacagatgtgttccagacactggtcatgttcctcgggcagctggcagttatcatcgtggggtcagccaaggtgggcggcttggggcgtgtgtgggccgtggcttcccagcacggccgcatctctgggtttgagctggatccagacccctttgtgcggcacaccttctggaccttggccttcgggggtgtcttcatgatgctctccttatacggggtgaaccaggctcaggtgcagcggtacctcagttcccgcacggagaaggctgctgtgctctcctgttatgcagtgttccccttccagcaggtgtccctctgcgtgggctgcctcattggcctggtcatgttcgcgtattaccaggagtatcccatgagcattcagcaggctcaggcagccccagaccagttcgtcctgtactttgtgatggatctcctgaagggcctgccaggcctgccagggctcttcattgcctgcctcttcagcggctctctcagcactatatcctctgcttttaattcattggcaactgttacgatggaagacctgattcgaccttggttccctgagttctctgaagcccgggccatcatgctttccagaggccttgcctttggctatgggctgctttgtctaggaatggcctatatttcctcccagatgggacctgtgctgcaggcagcaatcagcatctttggcatggttgggggaccgctgctgggactcttctgccttggaatgttctttccatgtgctaaccctcctggtgctgttgtgggcctgttggctgggctcgtcatggccttctggattggcatcgggagcatcgtgaccagcatgggcttcagcatgccaccctctccctctaatgggtccagcttctccctgcccaccaatctaaccgttgccactgtgaccacactgatgcccttgactaccttctccaagcccacagggctgcagcggttctattccttgtcttacttatggtacagtgctcacaactccaccacagtgattgtggtgggcctgattgtcagtctactcactgggagaatgcgaggccggtccctgaaccctgcaaccatttacccagtgttgccaaagctcctgtccctccttccgttgtcctgtcagaagcggctccactgcaggagctacggccaggaccacctcgacactggcctgtttcctgagaagccgaggaatggtgtgctgggggacagcagagacaaggaggccatggccctggatggcacagcctatcaggggagcagctccacctgcatcctccaggagacctccctgtgatgttgactcaggaccccgcctctgtcctcactgtgccaggccatagccagaggccaccctgtagtacagggatgagtcttggtgtgttctgcagggacaggcctggatgatctagctcataccaaaggaccttgttctgagaggttcttgcctgcaggagaagctgtcacatctcaagcatgtgaggcaccgtttttctcgtcgcttgccaatctgttttttaaaggatcaggctcgtagggagcaggatcatgccagaaatagggatggaagtgcatcctctgggaaaaagataatggcttctgattcaacatagccatagtcctttgaagtaagtggctagaaacagcactctggttataattgccccagggcctgattcaggactgactctccaccataaaactggaagctgcttcccctgtagtccccatttcagtaccagttctgccagccacagtgagcccctattattactttcagattgtctgtgacactcaagcccctctcatttttatctgtctacctccattctgaagagggaggttttggtgtccctggtcctctgggaatagaagatccatttgtctttgtgtagagcaagcacgttttccacctcactgtctccatcctccacctctgagatggacacttaagagacggggcaaatgtggatccaagaaaccagggccatgaccaggtccactgtggagcagccatctatctacctgactcctgagccaggctgccgtggtgtcatttctgtcatccgtgctctgtttccttttggagtttcttctccacattatctttgttcctggggaataaaaactaccattggacctaaaaaaaaaaaaaaaaaa

SEQ ID NO: 69 - DNA, 3263 bp, Human
gggccgggtccgggagccccagggcagccgccccgccgagtcgcagtgtcgggggctgcggggtgtctcggggccctggggtgagtgcggggcgcgggccgaggtttgcagggccctgtgagcgcgcccaggcacgtgttgcttcgggacgggccagccggtgggtgaaccctgccagccacgcgtggggcgggcccctggcacatctccagaccattgtctcctgtgccagaagctttgtaggtgcaacttccccttggagcagctgtgggtgcggatccagcggacgaatcccgaggcgtctcagagagagcctggacagccgctggagcctttcccgagtgggtccttccaacaccgctacagcaggaaagccatccccctagggtcctgtccatcggaaactcctgtcctggggagtctgcctgcctggcctcaggacacaggccaactaagctggccccgaaatccagaatgcatccagagggaaggcacagcgtcaccttcgtcccctccggagctgcacgtggcctgagcaggatggtgccctccagcccagcggtggagaagcaggtgcccgtggaacctgggcctgaccccgagctccggtcctggcggcacctcgtgtgctacctttgcttctacggcttcatggcgcagatacggccaggggagagcttcatcaccccctacctcctggggcccgacaagaacttcacgcgggagcaggcatgtcacgaacgagatcacgccggtgctgtcgtactcctacctggccgtgctggtgcccgtgttcctgctcaccgactacctgcgctacacgccggtgctgctgctgcaggggctcagcttcgtgtcggtgtggctgctgctgctgctgggccactcggtggcgcacatgcagctcatggagctcttctacagcgtcaccatggccgcgcgcatcgcctattcctcctacatcttctctctcgtgcggcccgcgcgctaccagcgtgtggccggctactcgcgcgctgcggtgctgctgggcgtgttcaccagctccgtgctgggccagctgctggtcactgtgggccgagtctccttctccacgctcaactacatctcgctggccttcctcaccttcagcgtggtcctcgccctcttcctgaagcgccccaagcgcagcctcttcttcaaccgcgacgaccgggggcggtgcgaaacctcggcttcggagctggagcgcatgaatcctggcccaggcgggaagctgggacacgccctgcgggtggcctgtggggactcagtgctggcgcggatgctgcgggagctgggggacagcctgcggcggccgcagctgcgcctgtggtccctctggtgggtcttcaactcggccggctactacctggtggtctactacgtgcacatcctgtggaacgaggtggaccccaccaccaacagtgcgcgggtctacaacggcgcggcagatgctgcctccacgctgctgggcgccatcacgtccttcgccgcgggcttcgtgaagatccgctgggcgcgctggtccaagctgctcatcgcgggcgtcacggccacgcaggcggggctggtcttccttctggcgcacacgcgccacccgagcagcatctggctgtgctatgcggccttcgtgctgttccgcggctcctaccagttcctcgtgcccatcgccacctttcagattgcatcttctctgtctaaagagctctgtgccctggtcttcggggtcaacacgttctttgccaccatcgtcaagaccatcatcactttcattgtctcggacgtgcggggcctgggcctcccggtccgcaagcagttccagttatactccgtgtacttcctgatcctgtccatcatctacttcttgggggccatgctggatggcctgcggcactgccagcggggccaccacccgcggcagcccccggcccagggcctgaggagtgccgcggaggagaaggcagcacaggcactgagcgtgcaggacaagggcctcggaggcctgcagccagcccagagcccgccgctttccccagaagacagcctgggggctgtggggccagcctccctggagcagagacagagcgacccatacctggcccaggccccggccccgcaggcagctgaattcctgagcccagtgacaaccccttccccctgcactctgtgctccgcccaagcctcaggccctgaggctgcagatgagacttgtccccagctggctgtccatcctcctggtgtcagcaagctgggtttgcagtgtcttccaagcgacggtgttcagaatgtgaaccagtgactctcgggcgcccctgtggtaactttgcaggcggccctcagtgcatccccacgacccctgcctcgagggccgcctgccttagcaatgggggcctccgcttatcctgctagcaggccccctaggattccccctgccctgtgccgcactctggcggtggccacagcgtgctggcgacactcagggcagctgcctggccatgctgtccctgcactgtgccccgcgggctttgttgctggaagaggtgggtggtgggcttctgcgtccaccaggcctcactggctcatgccccttggggggcttgagacaaatcctttctgccccccagggctagtgaagtggcctcttggataccagctcaggggacactggccccacaggagttgtgagccctctagggcagggtgggagccgggaccctcaggtgtagctgagctgtgacattgctggtcatccttggtgctcttgcttttttgaaagatgctttttttttttttaactgacgtagaatgaagaactgcatgtggcttctctgtctctgtggaaaagccatctcaggttggcggcagacacattgtcatcagaggggagcagcggctctggtcctcggagctggttcctctctcccaccctaagggcagccctccatggtcctgtctgtccttctgaagtgtgtccatcctgacctgcgggtcctcagctgctcccacacttgtgccagcccggaggggactggtcccggtcaccgcggacgtgctggccttggtatgtgccaggcttgcctgggctgggcagccttgggggggctgcctttgtggtgggcgctggggaagtacgtcccagcggcctcagggtctaaggagcgctagtgccttgcccacaggtgcgggaccatctgatgtgatgtgaatactcttcccacatacattaaacacacttaagtgag

SEQ ID NO: 70 - DNA, 3668 bp, Human
ggcagagggtgggccttaggacgggtctcccttaaactgggcgatcaggcagcgaccctagaggcgtctgtagggtaaagctgggggttctgtagccggaggcggcggcgagtccagaacgtcctggccttacagggagaaggcgtcactcgcggttacaagtgcctgaccctcactccagttggcggaggaggagaaggaaggggccgggccgggtcccctcccctcgcgccccggatggatgtgcccggcccggtgtctcggcgggcggcggcggcggcggccactgtgctcctgcggaccgctcgggtccgtcgcgaatgctggttcttgccgaccgcgctgctctgcgcctacggcttcttcgccagcctcaggccgtccgagcccttcctgaccccgtacctgctggggccggacaagaacctgaccgagagggaggtcttcaatgaaatttatccagtatggacttactcttacctggtgctactgtttcctgtgttccttgccacagactacctccgttataaacctgttgttctactgcaggggctcagccttattgttacatggtttatgctgctctatgcccagggactgctggccattcaatttctagaatttttttatggcatcgccacagccactgaaattgcctattactcttatatctacagtgtggtggacctgggcatgtaccagaaagtcacaagttactgtcgaagtgccactttggtgggctttacagtgggctctgtcctagggcaaatccttgtctcagtggcaggctggtcgctgttcagcctgaatgtcatctctcttacctgtgtttcagtggcttttgctgtggcctggtttttacctatgccacagaagagcctcttctttcaccacattccttctacctgccagagagtgaatggcatcaaggtacaaaatggtggcattgttactgacaccccagcttctaaccaccttcctggctgggaggacattgagtcaaaaatccctctaaatatggaggagcctcccgtggaggaaccggaacccaagccagaccgtctccttgtattgaaagtactatggaatgatttcctgatgtgctactcctctcgccctcttctctgctggtctgtgtggtgggccctctctacctgtggctattttcaagttgtgaactacacacagggcctgtgggagaaagtgatgccttctcgctatgctgctatctataatggtggcgtggaggccgtttcaaccttactgggtgctgttgctgtgtttgcagttggttatataaaaatatcctggtcaacttggggagaaatgacattatctctcttttctctcctgattgctgctgcagtgtatatcatggacactgtgggtaacatttgggtgtgctatgcatcctatgttgtcttcagaatcatctacatgttactcatcacgatagcaacttttcaaattgctgcaaacctcagcatggaacgctatgccctagtatttggtgtaaataccttcattgccctggcactgcagacgctgctcactctaattgtggtagatgccagtggccttggattagaaattaccactcagtttttgatctatgccagttattttgcactcatcgctgtggttttcctggccagtggtgcagtcagtgttatgaagaaatgtagaaagctggaagatccacaatcaagttctcaagtaaccacttcataatatactgctgaagggcttcttcttatagcaagaactctgcacagcaactgcctggatgtatttgattttttaaagcgtagacatatatttatgaatgtgcatttcttgacttcacagcagccacttgactaataccttgtgttccgggaataacatgatactattcagaggagccagaagtaaagtttatttcatggattatttatgagagctaatttaaggatgactttttttctgattcaaaagtgaacttgattttaaaaaccagtcaagagcaatcaaagcagcacatggtgttgtatacttcattagcaagtgagtttggtgttttataggtcacatatgtctgtatctacttagccagatgcttggcctggtgggaccagggctccacagaggccacaaaatgttgcaagtcatgatggatggaaatatgttctaacagcatctgcctctattcaatttaattcttatttctgtgttactcatgtacattggtctttctacatagttattctatcactggcaatatttgttctggtttagtgttctgtattttaaggtgtacgtatcatttctaattttaagttattttaaaaaaattcatcatatgaatgttcttggttcccattgtgacgattatttatttctgtaaaatttgtttagaagtacgtttttgcattattcatatgcttcccagagaagctcatttagttagaaaataaggcaagttttgaagcctgctaaatgaagagacttaagaaagcttaaggtacgcttgcttgtctttaaatcttcaatatgaaggactattaattccaagattaaaagttcatatataggctaaagatgtaactaggccatttgtatttgtattcccttttatttccaaaataaaatgaaaaatctttttttaataatttcatccctatttatagtttttatattaatttgtttttcttatccaagtaaagatgtcaataggaattgcattagtccaaggcctttttcataaactgagcctcttttcaattatttcaatgggacaggaactaggatagatgtgattcctgcatttttttaccttaaatctgcctttgtttctaaaggtagatcatcttgaatatttgcttaaaattgctagtgatttcattaccaagttacttgaaaaaatgttctatatgcatttaattctgaaatcagtctaccaaggggctgctagtatatgtcagacatgaaaactattttaaagctgactttgttgccttatcttgaaaagaatctagataggtgcttttaactggggtattaacttttttagaatgacacagctgaacagtgttaataatagtgtgtcaagattgcaaagtcgacatactcatttggtttaagcaggaatcctagaagcaaatggatggggataagaataggtcattttctattcaccatcctttactattaagggaaaggaaaagaacactagctaaggaagggaaagggaagtgatatcataaaagtagcaaccttcattttacattctgtctgtttttctttttttgctttgttttgtttgtgctaatttgggaattgtgtactccgaaacaagtagaaaagtgctgtttgagggattttattaaatctttttttaatggaatgtggtacaaattgttcatgttaccaaagcaatatttccctggaatttaattcaaagtttgtggcatacaacctgagccttttcttatataagacaagaatatgttcacatcttggtatgtggccatatttatagaatgctgaactcaatgtgcaagttgtactgtatgcagttttgtaaataagtgaaaataatttgttgtactttttattcaattctgtatagattataaaattatttttattaaataaatattttacagtataaaaaaaaaaaaaaaaaa

SEQ ID NO: 71 - DNA, 3775 bp, Human
caagagcgcctggatccatccgacagccgcgggtgcgtggtcgtgcggcaagtgagcgatttggtgaacagacactcccttctgtagccatggattgttacagaacttcactaagcagttcctggatttaccccactgtgatcctctgcttatttggttttttctccatgatgagaccctcagaaccattccttatcccatatttatctggaccagataaaaacctgaccagtgcagagataacaaatgagatcttccccgtttggacatactcctacctggtgctgctgctgcctgtgtttgtcctcaccgattatgtccgctacaagccagtcatcatcttgcaaggtatcagtttcatcattacctggctgctgctgttgtttggccaaggagtgaagaccatgcaggttgtagagttcttctatgggatggtcaccgccgccgaggtggcctactacgcctacatatacagcgtggtcagccccgagcactaccagagagtgagcggctactgcaggagcgtcacgctggccgcctacacagcagggtcggtgctggctcaactcttggtatccctggcgaacatgtcgtacttttacctcaacgtcatatccttggcctctgtctccgtggctttccttttctcacttttcctaccaatgcccaagaaaagcatgttttttcatgcaaaacccagcagagaaataaagaagtcatcaagcgtgaatccagtattagaggaaactcacgaaggtgaagcaccaggctgtgaagagcagaaacccacatcagaaatactcagcacttcagggaagctgaataagggccagctgaacagcctgaaaccaagcaatgtgactgtggacgtttttgtgcagtggttccaagatttgaaggagtgctactcctcaaaacgtcttttctactggtctctatggtgggctttcgccacagcaggttttaaccaggttttgaactatgttcaaatcctgtgggattacaaggcgccatcccaagattcttccatctataatggggccgtagaagctattgcaacctttggaggggctgtggctgcctttgcagtgggttatgtgaaagtcaactgggaccttctgggagagctggctctggtggtcttctcagttgtcaatgccggttctttatttctcatgcattacacagccaatatctgggcgtgctatgctggctatttgatattcaagtccagctatatgcttcttataaccatagcagtatttcagattgcagttaatctgaatgtggaacgctatgccttggtatttggaatcaacacctttattgccttggtgattcagaccatcatgactgtgattgtagtagatcagagagggctcaacttgccagtcagcattcagtttttagtttatgggagctattttgcagtaattgctggaattttcctaatgagaagcatgtatattacctactcaaccaaatcccagaaggatgtacagagccctgctccaagtgagaatccagatgtgtctcacccagaggaagagagtaatatcatcatgtcaacaaaactctaacctcatcgcaacaaacgcaacagtggctttcaaagttatgcaataataaggaaagattttgagatgggtggcatatgttttgccataacttgacatgctttgcaaatctggattccaatggacctttcaaaaccacaacaaaacctcagttttagatgagttctctatgtgaccaattttactggatgcaattgacaggacccgtcatcataattaaacaacccatattggggaccccctgtgactagtagcagctggaaaattctggtttttatcacttgtaaagacatgcagatggcgtggaaccaaaccatgagaaaactccagccatcctggagttgatattcaccatttgtgaggagaaatactaactggactgaccctattgctaggcttaaatacttatttgatcttaccaaagaagtcaacacatgggacctttgtgtcacatgaaccattttctttcctcttctattaagtgtatttctgtttaagttacagttctctaagagaattacaatgtttgtcccatttctaagggcttctcttcaactctaataacagcattattcacgttatgatttgatagtattattatttaatttttttatgattattttccattttgtgctctgagttttgctgttgaaagtctccctcaagaatagcttcagatcctcttgtgtatttgcagaatacacaaggtcatttcccagtggcctgggagaggcagtgagccttctctccaccaccatagacaggtgttaatgcatctatgggccaggtgcagtggctcactcctgtaatccgagcaatttgggaggccaaggtgggagttttgcttgaggccagaggttcaagaccagcctgggcaacacagtgacacctgactctactaaaaaattaaaaaattagctgggcagcgtggtgtgtgcctgtagtctcagctacttgggaggccatggtgggaggatgggttgagcacaggagtcagaggctacagtgagctatgattgcaccattgcactccagcctgggcaacagagtaagactctcatccccctcctcccaaaaaagagcacctgtgtggtgtctgtctaaaataggaaaacttaaaggaggtttctagaagtattagaaataagaaaacactgatggggggagtggaataaaacacctgattttgttttgttttggtttttgagacagtctcgctctctcacccaggctggaatgcaatggcgtgatcttggctcactgcaaacttcacctcctgagttcaagccattctcctacctcagcctcccaagtagctgggactatgggtgcacaccaccacgcctggctaatttttgtatttttagtggagatggggtttcacaatgttggccaggctggtctcaaactcctgacttcaggtgatctgtctgcctcggcctcccaaagagctgagattacaggcgtgagccaccatgcctggccaaaacacctgatttttaaatggtagcaattgtgctaaataaaatgtgtaaaaattttaaagagttgttaacattttttgatgaattctgctgaaaattatctgaacatacctgtttttcgaaacttcaagaaacttcaataagggatgcattgagcagtctgacagtgagaataaagaatgctgagtcaagatttatattaaggctggaagctgtggctcacacctgtaatcccagcattttgggaggctgaagtgagaggttaatttgagggtaggggtatgagaccatcttggccaatatagcaagaccctgtgtctaaaacaaacaaaaaaatttttaattggattttgatatggtttggatctgtgtccccaccaaatctcacgttgaagtgtaatccccaatgttagaggtggggccggctgggaggcgactggatcatgggtgtgaagccttcatgaatggtttggcaccgtcccctcagtgctggtctcatgacagtgagttatcgtgagatctggtagtttaaaagtgtgtagcacctccccactctctctttctcctgctttggccacgtgaagatgcctgctcccactttgccttctgccatgagtaaaaattccccgaggactccctagaagcagatgttgccacgcttcctatatagcctgtgagctaattaaaccccttttcttacaaactaaaaaaaaa

SEQ ID NO: 72 - DNA, 2326 bp, Human
ggcctttgtcaagtcatcccctcttctcctcaggaactgctcaaacctgtgccccaaagatgagggcccaggaggacctcgagggccggacacagcatgaaaccaccagggacccctcgaccccgctacccacagagcctaagtttgacatgttgtacaagatcgaggacgtgccaccttggtacctgtgcatcctgctgggcttccagcactacctgacatgcttcagtggtaccatcgccgtgcccttcctgctggctgaggcgctgtgtgtgggccacgaccagcacatggttagtcagctcatcggcaccatcttcacgtgcgtgggcatcaccactctcatccagaccaccgtgggcatccggctgccgctgttccaggccagtgcctttgcatttctggttccagccaaagccatactggctctggagagatggaaatgccccccggaagaggagatctacggtaactggagtctgcccctgaacacctctcatatttggcacccacggatacgggaggtccagggtgcaatcatggtgtccagcgtggtggaggtggtgattggcctgctggggctgcctggggccctgctcaactacattgggcctctcacagtcacccccactgtctccctcattggcctttctgtcttccaagctgctggcgaccgagctggctcccactggggcatctcagcttgctccattctcctgatcatcctcttctcccagtacctgcgcaacctcaccttcctgctgcctgtctaccgctggggcaagggcctcactctcctccgcatccagatcttcaaaatgtttcctatcatgctggccatcatgaccgtgtggctgctctgctatgtcctgaccttgacagacgtgctgcccacagacccaaaagcctatggcttccaggcacgaaccgatgcccgtggtgacatcatggctattgcaccctggatccgcatcccctacccctgtcagtggggcctgcccacggtgactgcggctgctgtcctgggaatgttcagcgccactctggcaggcatcattgagtccatcggagattactacgcctgtgcccgcctggctggtgcaccaccccctccagtacatgctatcaacaggggcatcttcaccgaaggcatttgctgcatcatcgcggggctattgggcacgggcaacgggtccacctcgtccagtcccaacattggcgtcctgggaattaccaaggtgggcagccggcgcgtggtgcagtatggtgcggctatcatgctggtcctgggcaccatcggcaagttcacggccctcttcgcctcgctccctgaccccatcctggggggcatgttctgcactctctttggcatgattacagctgtggggctgtccaacctgcaatttgtggacatgaactcctctcgcaacctcttcgtgctgggattttccatgttcttcgggctcacgctgcccaattacctggagtccaaccctggcgccatcaatacaggcattcttgaagtggatcagattctgattgtgctgctgaccacggagatgtttgtgggcgggtgccttgctttcatacttgacaacacagtgccagggagcccagaggagcgtggtctgatacagtggaaagctggggctcatgccaacagtgacatgtcttccagcctcaagagctacgatttccccattgggatgggcatagtaaaaagaattacctttctgaaatacattcctatctgcccagtcttcaaaggattttcttcaagttcaaaagatcagattgcaattccagaagacactccagaaaatacagaaactgcatctgtgtgcaccaaggtctgaaaaatgacttccaggaaaggaagcatggtatataacaggaaaagaaaactacatggggaaccagaagacctaagcctgaaatcccagccctgcccctaactaacttctgtgtaaactcagataagtcacctttctctgggattcaaatttttgcatcagttaaaaaaaaaggggtgggggggaatgggccaaagtctgagtcttagagacttgtaccaatgttatgctatgtctctaaatctttactctcctaagtagacttgtcagcatctaggaagaacagctagaaattttcctctgtgatattttagactgcaagttgaaaaaaataaaaagaaatgagggcaggttccagggcctgaaatgtaggtatgctgcaaggcttttacattgaatttgaccctacatcacttcaagactaatgcataatattaaacatcatgttgaagaaaaaaaaaaaaaaaaaaaaa

SEQ ID NO: 73 - DNA, 6953 bp, Human
ggcggctgtcgcggggaccggaggcggaggctgcagcgggcactgcggcgccgaggcgcggcggcaggacgggaaccacgcgagctgcagccagctaggtcttgactccactaacggggacttctcatacggctttgaacttggaccttggtgcataagcaaatgtaactcagcgaattgtaatggaaagcatatggacaggtctacgccacatcacttaggtgctaagagatgccgtttgcaggcctcatctctgcttgagaatcgggggctccaggcactagaagagccggctgatcctgggctcctagcttgaataagccttcacttccagctgctctccccaacggctgtgtaaactactcgtttctcttaatgatgggtattggtaagaataccacatccaaatcaatggaggctggaagttcaacagaaggcaaatacgaagacgaggcaaagcacccagctttcttcactcttccggtggtgataaatggaggcgccacctccagcggtgagcaggacaatgaggacactgagctcatggcgatctacactacggaaaacggcattgcagaaaagagctctctcgctgagaccctggatagcactggcagtctggacccccagcgatcagacatgatttataccatagaagatgttcctccctggtacctgtgtatatttctggggctacagcactacctgacatgcttcagcggcacgatcgcagtgcccttcctgttggccgatgccatgtgtgtggggtacgaccagtgggccaccagccagctcattgggaccattttcttctgtgtgggaatcactactttgctacagacaacgtttggatgcaggttacccctgtttcaggccagtgcttttgcatttttggcccctgctcgagccatcctgtctttagataaatggaaatgtaacaccacagatgtttcagttgccaatggaacagcagagctgttgcacacagaacacatctggtatccccggatccgagagatccagggggccatcatcatgtcctcactgatagaagtagtcatcggcctcctcggcctgcctggggctctactgaagtacatcggtcccttgaccattacacccacggtggccctaattggcctctctggtttccaggcagcgggggagagagccgggaagcactggggcattgccatgctgacaatattcctagtattactgttttctcaatacgccagaaatgttaaatttcctctcccgatttataaatccaagaaaggatggactgcgtacaagttacagctgttcaaaatgttccctatcatcctggccatcctggtatcctggctgctctgcttcatcttcacggtgacagatgtcttccctcccgacagcacaaagtatggcttctatgctcgcacagatgccaggcaaggcgtgcttctggtagccccgtggtttaaggttccatacccatttcagtggggactgcccaccgtgtctgcggccggtgtcatcggcatgctcagtgccgtggtcgccagcatcatcgagtctattggtgactactacgcctgtgcacggctgtcctgtgccccacccccccccatccacgcaataaacaggggaattttcgtggaaggcctctcctgtgttcttgatggcatatttggtactgggaatggctctacttcatccagtcccaacattggagttttgggaattacaaaggtcggcagccgccgcgtgatacagtgcggagcagccctcatgctcgctctgggcatgatcgggaagttcagcgccctctttgcgtcccttccggatcctgtgctgggagccctgttctgcacgctctttggaatgatcacagctgttggcctctctaacctgcagttcattgatttaaattcttcccggaacctctttgtgcttggattttcgatcttctttgggctcgtccttccaagttacctcagacagaaccctctggtcacagggataacaggaatcgatcaagtgttgaacgtccttctcacaactgctatgtttgtagggggctgtgtggcttttatcctggataacaccatcccaggcactccagaggaaagaggaatccggaaatggaagaagggtgtgggcaaagggaacaaatcactcgacggcatggagtcgtacaatttgccatttggcatgaacattataaaaaaatacagatgcttcagctacttacccatcagcccaacctttgtgggctacacatggaaaggcctcaggaagagcgacaacagccggagttcagatgaagactcccaggccacgggatagcctttgctgtgccctgtggcctggccgcagtgaggcatgtatctgtagttccttgctgagtaacaagaagtaaaatacatgtttgtatatctacatttacattctgcgccccagagctaagacagactgcgaatcacttttctgctgtgagggtgatggtgcctgatgcggtgtctcgcctatctccttatttaagcccttaactccttgccctttgagagtgtccattgctggccatggtcactaaatttgaagttccagtcctccctttggagtggacatttaaaatctgcagccattccttgcttcagttcccttccaccacccagggctggctttcctataagccacctccagggtccaggggctttctctctctctccgaagcccctggacctgtttccttgtcatttgaccctcgtctgtgcccgcggagacctcctctgaccaaggggcactagtatgccttgcgctatcatgactgactggcccagtatgattctgttgtcgctgatctcccggaggaggaggctgttgacctgaaaacagtggcgtggctcccctgtgcccagatctggccatgggtgaggcctgcacagatgttgaatgaacatctgtttggggcattggagggaaaaggaaaggaccctgaagccaatatctgattctcggctgcaccttctcttggccaccctggccctgaccgggccagcacgtgcacactggcctcttttcatttcactagtggccgagacaccctctctggcatttatcactgttggccggtgtgatgagtatagagtgccacccaaggcaccagtcacacaagctgatgggcgtcttggctctgccgtcatgtggatgttattgtcgcgcgcgtctataattacaaggttttattcctatttaatgttattgactatagcagattttggaaatcagtgttttccatgtgaccctctttccttgcatccctattccttgtcccccacccactcttccccccatcaagaaaagaaccagcatttgtaaagctgtggacaccatcagggaagcttgttgtaacggcttttgaaggccagtaaccattgttgtggttgtgttttgtattgcttgataccatgaaagtgtaaatactgtaatgcctaatctatttatcaaaactgactactggaccggagcccagaaaccatgggtcaagttacacgtgaatttgttttgtgaagaagggaagctggggcaggtaacacgcagagccgccacgtggaacggtctgtccgccggtctgtcccgcttgccgggcttctgttgcaagtcttggcttaaggagacttcctgtgggttgccatgtcgcacgtccgttagatcttgattttacaggtgagggtggttgccaaaggtgataagaaaagcagccaacaggctccctctcacttaagagagttctaattaataacactaaattcttcctgagaaatgactcctcttggtttggtttgaagtttttcagtgaaggaaaaggcctgagataggaagcagtgccctcgcttcatgaggtggcacatcttcggtggccgttggcctggtcgagctttggtcagctgcgtgggtgcctgtctcctgtctccagcggcagggcatggttcttggcagcctggtgtccacacggtgcattcctgtccccctcggccccaggctggctcagctctccagtgctgcggcgctgtctttgcagcattgccatgtcaccgtagcccccttcactcttggaagtttggggcttcaaggtttattctggcaagaacacctcggagccactgcattgttttgccaaaaacttactgcagattaagtaaagaacttagatgctaaattacatctaattttgtatgtttttttaaatgtgtctttgatgcatactttagaagcacactggctcgcggtttccatccctcttgccttgggacactcttgaggctggcagccctcctgcaatgagttgctctcagttccttctgtttggattttgctcaacatctccagtttctctgctctgaaaaatggggaaaactgctaaacatcccagagatttgcaatcttctagctctccaggtgagcagaaagaccaaatatccaaataaaagcctgaaagccattggtgatccaggggcaccttctcttcagcttgactgggcgtcttccgctgcataacactcaaggtgtctgctctagtcatccagaaacccactcccttctgaagcccctccttgggccgggttgtatcaggaggattcaaccccgctaacatgtggggtgccctctgtaggccttcacacagggaaggaagccctaccctttcaactcctgttggagtgagagtttcctgttctgattccactgtggccaacccaataattctgtccgaggaggggtaagggaataggaggtggggagcaaagagggcagcctgactagatgcccctgctgaatctggtactttctgcacagccttgagtgattggagtcccctaatgactaataaacttgaacatgtaacacacacacacacacacacacacaccattttaggaagtggttctcctactggaaaatatgctacagaatgaaagtttgtaattgaaagaaaaagaatgtattcatctgcttcttgggtttaagcacacacctgaaggggagatattgggggacacggtggccactcgcggtctgtgtcatgacacttcccattcacatcattggcctgcgttgctggggctttgaaccaccaccccgtactttgttttgcctgtagagtgttgtaaaatattttggatgtgaatgtccttgcaggccggttagtctccagtttccacagagaccacctacccaccaccttcccaggtcacctgcctggtccctgaaagaaagcatttgtgtgggcaatcccaacatgaaatgtagacagcgtgaatacggacaggaggtgatgccatattcacagtgggggatggagggcccccacccctgcttcacagaataatgggaagtgactctagtctttgtaagcaattttcattctcattaggaagttaaatgtagattcacagatacatttactttcagaatcctcaagaggatttcaaatgctaacttttagtttcttgggattgatcaaggcaagagaagtggctttaaccatgccagccagaatgaagcatcatgggtcctgatggtttcccgttttcatggtaacaaattcgcacagaggttttgctttatgctgtagaataccgactttcatgatgacaacttggtttatgcatgaatattgcagtatttccatatagcaaaataacatttctacccaggataatagtcacagttttccagggagggaatgatataattttcatgacaatgtcatgtgatgatagaatttctccattgatgaatctctagtatgtgtgtatactttatttacccatacgtatattttatgaccatgagctaagttgttatttctttcattcatatccctgctgaaatattggtactagcaacttaaagttggcaagtctcatcttcagtaatacggatgccatgggagtggccaggccagattgaaggtgaatatggagcagtagcagaagcctcattccagaacccatctggccagagaagcagcagcatcctgggggatggccgtgcatggggtgtacactcgctataggcataggcccggcatggctgtcgctggacgccagctgtgcacacccagccacacctgctgcacgccgcgttagtgtgcggctccgggcctgagcattcgcaaagctcgcttctccagggagcctcctcttggctttggaaaagagcccagggacttaacgtgctgcctgttgtactctgtcccctcatgactttttagacacagggactaggacatcgaccaccctctgcccctcctgcagtcagaacccgagtagtgcaagaacggccacccggttttgccagcgttcagcgtctgcccatggacccataaggcacattagcgttgggggtctcttttcagcagcctcacagacattcccgtcctttctggttggtgttgactgtgtttcagcatcactctaccctcccatgtccttagcattgctgtgcgtgtttccaggcacttaggacacccttccccacgttgccatcttactgacagttcaaatgactctccttttttgttcgttagtaacaatcttcatttgacaccttaatacatttctgactgttcttaaaacagtggggatgcctatattttccttgagtttttgtgactgactttggctatatatacctttctggggttttgtttgttttttatttttattttgattaccgagggtatttggggtggggttgttttttgagatgtgtaattcttttatggagtttttaaaaagaattttcatattgtttttctaacatggcttcattaaacgtttaagtattttaaaaatatgtaatatttggaccagatgttgtgaataatagtagagataaagctattttattctgtatttttaaaactgttccgtacaaataaaagctctcctggacacagtaaaaaaaaa

SEQ ID NO: 74 - DNA, 1619 bp, Human
tgggaccataaccggccgccgccgccaccgcggaccgagcgcggagttctggagtctcggacccgaagccgccacagggcgccccgcctcccgcccgccatgcccgcgccccgcgccccgcgcgctctggcggccgccgcgcccgcgtccgggaaggccaagctgacgcacccggggaaggcgatcctggcaggcggcctggcgggtggcatcgagatctgcatcaccttccccaccgagtacgtgaagacgcagctgcagctggacgagcgctcgcacccgccgcggtaccggggcatcggggactgcgtgcggcagacggttcgcagccatggcgtcctgggcctgtaccgcggccttagctccctgctctacggttccatccccaaggcggccgtcaggtttggaatgttcgagttcctcagcaaccacatgcgggatgcccagggacggctggacagcacgcgtgggctgctgtgcggcctgggcgctggcgtggccgaggccgtggtggtcgtgtgccccatggagaccatcaaggtgaagttcatccacgaccagacctccccaaaccccaagtacagaggattcttccacggggttagggagattgtgcgggaacaagggctgaaggggacgtaccagggcctcacagccactgtcctgaagcagggctcgaaccaggccatccgcttcttcgtcatgacctccctgcgcaactggtaccgaggggacaaccccaacaagcccatgaaccctctgatcactggggtcttcggagctattgcaggcgcagccagtgtctttggaaacactcctctggatgtgattaagacccggatgcagggcctggaggcgcacaaataccggaacacgtgggactgcggcttgcagatcctgaagaaggaggggctcaaggcattctacaaaggcactgtcccccgcctgggccgggtctgcctggatgtggccatagtgtttgtcatctatgatgaagtggtgaagctgctcaacaaagtgtggaagacggactaagcctagagaggccgcaaggggaccgccccaggcaccgccagagtgtcctgctacctttgtctcacatgattccagtgcagtagtgccaaaaggccccttcccacgtccctcgagctctgtagcctggtctgtgcattgtggctgtcaaatccatgtgtcccccctgtggtctgtgtgtgacaccaccactgtgtcccagtgtctggcccagccatggctggatgtgcatctggcctatgaccctgtgcccacttgtccatgtgcttactgtgaaccctgtgcctgtgtttcatgttctgtgtcacgtgaccctgtgccccgcctcccggggtgcccgtgtggcctgggtcctcggccctgtagccctggcccggtcccagtccggtgccttccaccctgccctggcctaccacagctgcctccgggcctcggcctggcttcaccgcattccaggggctgcagccccctgcttctcccgccattggccttaactggccctcgggccctctctccgccccggacagggtggcacccaccactctcaggaccaccctgccaaggcagaataaaccggatcctgttgc

SEQ ID NO: 75 - DNA, 1921 bp, Human
cggggcgcggggcgctgcggccggtacacgccggggtagggccggggtcgggttgtggtcgggccgggattgggctctcctgggccatggcagccgaggcgcgcgtgtcgcgctggtacttcggggggctggcctcctgcggggccgcctgctgcacgcacccgctggacctgctcaaggtgcatctgcagacgcagcaggaggtgaagctgcgcatgacgggcatggcgctgcgggtggtgcgtaccgacggcatcctggcactctacagcggcctgagcgcctcgctgtgcagacagatgacctactccctgactcggttcgccatctacgagactgtgcgggaccgtgtggccaagggcagccaggggcctctccccttccacgagaaggtgttgctgggctccgtcagcggtttagctggaggcttcgtggggacgcccgcagacttggtcaacgtcaggatgcagaacgacgtgaagctgccccagggtcagcggcgcaactacgcccatgcgctggatggcctgtaccgcgtagctcgtgaagagggtctcaggagactgttctcgggtgcaaccatggcatccagccgaggggccttagtcactgtgggccagctgtcctgctacgaccaggccaagcagctggtccttagcaccgggtacctctctgacaacatcttcactcactttgtcgccagctttattgcaggtggatgtgccacgttcctgtgccagcccctggatgtgctgaagactcgcctgatgaactccaagggggagtatcagggcgttttccactgcgccgtggagacagcgaagctcgggcctctggccttttacaagggcctcgtcccagctggcatccgcctcatcccccacaccgtgctcacttttgtgtttctggaacagctacgcaaaaactttggcatcaaagtgccatcctgaccagccgtgggaatggctgggctgccaggccagacacgctaggttcttccaaagagtcccaagcccagcacctgctcctggggccacgacctccctggccgtggccacccgtcctccgcagcaggcccctgctgtccccccacctgctggctgagctcctcctggcctcgtcccctctcagctgtagctgcaccacccccgctctggctaccaggctctcccggctgggcactgcgtggccttgcccctctcccgctggcagctcctcaggggaacaggggctaccagaggctgatttctcccctctcctgggccaggggaggggtattatccctgcctcctgcccccgatgcccaaagcagcatcttccagcactttccatcgaggacttgggtggcagagtgtgggtgcagcctggctgttgctcacccaagtgctagctctgcacttcgtgtctgctgagagcaaccagaccttccatgtcctcgggcagctgcaactccccgcgagaccccgcagctgggtgggatgaacaagcaacgcagaccacaagcgagtgcctgggagggagtggcccagggtggttctggagccattgtgggtgagggtcgagggccaccgaggtcccgcgcaccgctgcctgccctgcagtggctttaacagttagttttgccaaagcctctccactcaccagcaggcggtctctgtcttcagggattgtgcctgcgtccctcgggcacctgggcccccccgcttggctccctgggggaatggcccaggcgggctgcggttcctccttagggccttctccccgacaaggagtccgacggggcggatgctgcatcctctgcctccctggtcgctgggcttcaccccacctgggaagggcagtgtgctctgtgggggctgcaatcaataaatgccgggagctgccaaaaaaaaaaaaaaaaaaaaaaaaaaaaaaaaaaaaa

SEQ ID NO: 76 - DNA, 4516 bp, Human
ctcggcgcgcctggacccctgcccctctctgggtggagaagctcccggccgcttcccggtttcactccttctcagcctgggctcccagcccctctctccttttcctggactggctctcacccccttcggtccccttcctttagctcaggctccctaccccttcctttagcccacagcccagagtcccagctcctcagtcactttcctcagccaaaggtcccagccttccttcttcctttcctttgcactatccctatcctgccccttcctctatccctagggctcagtttcccacatccgtcctcccccttcccaggcccggagttccagaccttttggtctcctttcgtggtcgttcctgggtccttgccccctttccccactttggagttccagattgcaaacccagcctccctccacccccagaaaattgcttccatggaaatgcctctctaaaacatgaacttttcctagagactacgccagtctctcttcccacttgctgaccctttgctacctatgtgcccggttttactctcatttgggtaaggtcgaggctggctctggaagcagcaccatggttctgcggtctggcatctgtggcctctctccacatcggatcttcccttccttactcgtggtggttgctttggtggggctgctgcctgttctcaggagccatggcctccagctcagcccaactgccagcaccattcgaagctcagagccaccacgagaacgctcgattggggatgtcaccaccgctccaccggaggtcaccccagagagccgccctgttaatcattccgtcactgatcatggcatgaagccgcgcaaggcctttccagtcctgggcatcgactacacacacgtgcgcacccccttcgagatctccctctggatccttctggcctgcctcatgaagataggtttccatgtgatccccactatctcaagcatcgtcccggagagctgcctgctgatcgtggtggggctgctggtggggggcctgatcaagggtgtaggcgagacaccccccttcctgcagtccgacgtcttcttcctcttcctgctgccgcccatcatcctggatgcgggctacttcctgccactgcggcagttcacagaaaacctgggcaccatcctgatctttgccgtggtgggcacgctgtggaacgccttcttcctgggcggcctcatgtacgccgtgtgcctggtgggcggtgagcagatcaacaacatcggcctcctggacaacctgctcttcggcagcatcatctcggccgtggaccccgtggcggttctggctgtctttgaggaaattcacatcaatgagctgctgcacatccttgtttttggggagtccttgctcaatgacgccgtcactgtggtcctgtatcacctctttgaggagtttgccaactacgaacacgtgggcatcgtggacatcttcctcggcttcctgagcttcttcgtggtggccctgggcggggtgcttgtgggcgtggtctacggggtcatcgcagccttcacctcccgatttacctcccacatccgggtcatcgagccgctcttcgtcttcctctacagctacatggcctacttgtcagccgagctcttccacctgtcaggcatcatggcgctcatagcctcaggagtggtgatgcgcccctatgtggaggccaacatctcccacaagtcccacaccaccatcaaatacttcctgaagatgtggagcagcgtcagcgagaccctcatcttcatcttcctcggcgtctccacggtggccggctcccaccactggaactggaccttcgtcatcagcaccctgctcttctgcctcatcgcccgcgtgctgggggtgctgggcctgacctggttcatcaacaagttccgtatcgtgaagctgacccccaaggaccagttcatcatcgcctatgggggcctgcgaggggccatcgccttctctctgggctacctcctggacaagaagcacttccccatgtgtgacctgttcctcactgccatcatcactgtcatcttcttcaccgtctttgtgcagggcatgaccattcggcccctggtagacctgttggctgtgaagaaaaagcaagagacgaagcgctccatcaacgaagagatccacacacagttcctggaccaccttctgacaggcatcgaagacatctgtggccactacggtcaccaccactggaaggacaagctcaaccggtttaataagaaatatgtgaagaagtgtctgatagctggcgagcgctccaaggagccccagctcattgccttctaccacaagatggagatgaagcaggccatcgagctggtggagagcgggggcatgggcaagatcccctctgccgtctccaccgtctccatgcagaacatccaccccaagtccctgccttccgagcgcatcctgccagcactgtccaaggacaaggaggaggagatccgcaaaatcctgaggaacaacttgcagaagaccaggcagcggctgcggtcctacaacagacacacgctggtggcagacccctacgaggaagcctggaaccagatgctgctccggaggcagaaggcccggcagctggagcagaagatcaacaactacctgacggtgccagcccacaagctggactcacccaccatgtctcgggcccgcatcggctcagacccactggcctatgagccgaaggaggacctgcctgtcatcaccatcgacccggcttccccgcagtcacccgagtctgtggacctggtgaatgaggagctgaagggcaaagtcttagggttgagccgggatcctgcaaaggtggctgaggaggacgaggacgacgatgggggcatcatgatgcggagcaaggagacttcgtccccaggaaccgacgatgtcttcacccccgcgcccagtgacagccccagctcccagaggatacagcgctgcctcagtgacccaggcccacaccctgagcctggggagggagaaccgttcttccccaaggggcagtaacgccagggccagcaggcagcgcctgtcccctcacagactcttccaccagagcaggggctgctgggggctccccttgcccttcctgacccggattggccctgcccctccccctaccgcatggcagctgggcccacagcccccaccccagcacagctcctcccctgccgcctcccgggaagcatcctccccaccagagctgcctccccaatccatttggcagaactgctggggctggtgaggccggccctgcccctccctagatccaggcttctcccggacctggactagggcctcggaggctcctccctctgcctcatcctcctcctcattcagaccaatcttagtttctaaccaaagagtctctggctcagctgtggtcccacccaggaagggagggagctgaggcctcccttgagtaggccctgctttatcaggggacaaaccaggggtaccaggcacatggctgggggagggactgctgacccaccaaggtctcacactcctcctgccagctctgtcaccctggccaccacccaacctatccttactcagagctgcgggctgagggcatctctgagtgtctctgcctggagcaggggtggtttctacggtgacagtgacgtgactcagagcttttcgaactgtgctcccacggggaccactgggcccctcaggggaagctgctaggggaaggactggccgtggctccagaatgtgctgcctttttaagttttgtttgttcacactcctatatatgattgtttgcacagagggcgctcctgtttttaaaacattttgaaaacccctggctgaacagtgctctgcctctaactccctcctcacactccagaattacccttcctcatctgtgcctgtctgtccaacccctcccccacgtctctctgcctgctgggctcttaactgttgctcgaagactgtgacatcagaagtaactcccactcctaatcaagagtctctccagcctcacagatgctggcctcttggcacctgcctagctcttgggcctgacctccagtcctgctggcctgctcttacttcccccaccctgggtttggcccctggaacctttcccttgtgtgtaccacaccctgcctgctgtggagcccattgtggaggcggtgggggggagaaggcctcccctgaggatcccctgtcccctggggctggtggattgggcagaatcctgggcccccagagacctttgcccacacacactccttccccttgtccctggggcactcccccaggattgtgcaatagtcagagtgtccctttttgcaggggactgggccatgggtcctcggcccatctgtccatcctcctctccatgcaagtgctgtttgggcaggagtcaccatgcaagggtgacatcgacaaccacgtaccaagccaccgcagctgctgccactctgctgcctgtacagaagaaactgaatctttttcatattctaataaatcaatgtgagtttt

SEQ ID NO: 77 - DNA, 3409 bp, Human
tgcgacgtgactggctagctgcgtgggtactggaacaagcaaacgaggcagcgagcgaaggacgggagccggaccctgggccccgtggaactccagcctgcgccaccacgtcacgcacacgctcggcgctgcgatccgcgcatataacgatatttggatttgacctgcattttggaatttatctacacttaaaatgccaccagcagttggaggtccagttggatacacccccccagatggaggctggggctgggcagtggtaattggagctttcatttccatcggcttctcttatgcatttcccaaatcaattactgtcttcttcaaagagattgaaggtatattccatgccaccaccagcgaagtgtcatggatatcctccataatgttggctgtcatgtatggtggaggtcctatcagcagtatcctggtgaataaatatggaagtcgtatagtcatgattgttggtggctgcttgtcaggctgtggcttgattgcagcttctttctgtaacaccgtacagcaactatacgtctgtattggagtcattggaggtcttgggcttgccttcaacttgaatccagctctgaccatgattggcaagtatttctacaagaggcgaccattggccaacggactggccatggcaggcagccctgtgttcctctgtactctggcccccctcaatcaggttttcttcggtatctttggatggagaggaagctttctaattcttgggggcttgctactaaactgctgtgttgctggagccctcatgcgaccaatcgggcccaagccaaccaaggcagggaaagataagtctaaagcatcccttgagaaagctggaaaatctggtgtgaaaaaagatctgcatgatgcaaatacagatcttattggaagacaccctaaacaagagaaacgatcagtcttccaaacaattaatcagttcctggacttaaccctattcacccacagaggctttttgctatacctctctggaaatgtgatcatgttttttggactctttgcacctttggtgtttcttagtagttatgggaagagtcagcattattctagtgagaagtctgccttccttctttccattctggcttttgttgacatggtagcccgaccatctatgggacttgtagccaacacaaagccaataagacctcgaattcagtatttctttgcggcttccgttgttgcaaatggagtgtgtcatatgctagcacctttatccactacctatgttggattctgtgtctatgcgggattctttggatttgccttcgggtggctcagctccgtattgtttgaaacattgatggaccttgttggaccccagaggttctccagcgctgtgggattggtgaccattgtggaatgctgtcctgtcctcctggggccaccacttttaggtcggctcaatgacatgtatggagactacaaatacacatactgggcatgtggcgtcgtcctaattatttcaggtatctatctcttcattggcatgggcatcaattatcgacttttggcaaaagaacagaaagcaaacgagcagaaaaaggaaagtaaagaggaagagaccagtatagatgttgctgggaagccaaatgaagttaccaaagcagcagaatctccggaccagaaagacacagaaggagggcccaaggaggaggaaagtccagtctgaatccatggggctgaagggtaaattgagcagttcatgacccaggatatctgaaaatattctactggcctgtaatctaccagtggtgctcaatgcaaatagtagacatttgtgtggaaatcataccagttgttcattgatgggatttttgtttgactccttaccaatagcctgaatttgaggagggaatgattggtagcaaaggatgggggaaagaagtaggttctgttttgttttgttttaatcttagcttttaatagtgtcataaagattataatatgtgccttaagttttagtctttagaactctagagagccttaacttcttaaaccatttttgctgaattcatctatttcgagtgttgtgttaaaaggaaaaataacaactaacttgtttgaggcaaatctaaaatttaaaattaatcttgcttcattgttacatgtaatatatttcagacattttcactggaagatttatgaacagaaatattggttgaaagttagagattttacaaaatgctgacaaaaatattttcctagcatcagtagatttctggcatatgtttctgctagctatatatttaggaaattcaaagcataaaactttggcaacatcttggctgttctagacacagtgtacttgtcaacccctctcaggtaccttttcttgggatgcttattagaagccaagtaaagtgcttaaggtttgttttcattaaattagctatttctgctcccctgttcaaagatgcattttgagtgtttatagatcactgccctttttgaaatcacctggtattatttttcttactggaaaagttagtattaaaatctacagaactacatatttgtgcctccttggtaaatacaacacatctaattaaatgtagacagatatttcaaacatcagctgaattcacttaagtttttccaaaacctcagttaaactgtgaagctattggaatttttttttcctggaatttttcccctttgattcacagtggtcccatttatatctgcttctagcttagtgctatgtgtgagatatgtgtgtgtttggtgtttttgtttttttgtttttttttttttaaggtttgcaaattaaaaagggccagaaaaatttggcaccaggcaaacgaataaagataggattgggaaagaagttgctaagtgtgcttagttttaataagtaattccttctcttttttcagagaaggccttacagaaaattgttgtgcttagaattgctggatgcatttttaccctccacacaaacctaaaaattttgtgacccctttcacttacctgaaaagtagagaaatggattcagtataaggataaggagggaaggtggaccagaatgaaaactgtaaatatttttttaacctaatatcacttaaatcgaggcagaaagatatagacattcaatgaattatattcaatgcatttaaaataccactgtaattgacagagtaaaagtatagatacaaaaccttgtgtaagaggctgacttttccaaataaacattttttaagaaaacatttcttctcccaaatgtctattttcttgaggaaaatattgctgtgtcttcattttcattaccaggtttcattttgggccttgctaaattgattgaattaaatcctccagcttttgaaccttgaaaaaaaaaaaaaaaaaaaaaaaaaaaaaaaaaaaagaaaaaaaaaaaaaaaaa

SEQ ID NO: 78 - DNA, 6950 bp, Human
ggccaaaggtcaagatacttctctgggaaatgttgctgctgatgctgctttacaaagtcatacaatgagtgtttggtttaagaaagattttcatacttaaaagattttcatcttggaaatacatcaagtgaaaattaaattcttttgggaaacattttccttctgatatattatacttgtaatgggcgacatggcaaacaactcagttgcttacagtggtgtgaaaaactctttgaaggaagctaatcatgatggagactttggaattacgctcgcagagctgcgggctctcatggagctcaggtccacagatgcattacgaaaaatacaggaaagctatggagatgtctatggaatttgcaccaaattgaaaacatctcccaatgaaggtttaagtggaaaccctgcagatttagaaagaagagaagcagtgtttggaaagaattttatacctcctaaaaagccaaaaacctttcttcaattagtatgggaagcattacaagatgtcactttaattatattagaaattgcagccatagtatcattgggcctttctttttatcagcctccagaaggggataatgcactttgtggagaagtttctgttggggaggaagaaggtgaaggtgaaactggttggattgaaggagctgcaatcctcttgtctgtagtgtgtgtggtgttagtaacagctttcaatgactggagtaaggaaaaacagtttagaggtttgcagagccgaattgaacaagaacagaagttcactgtcatcaggggtggtcaggtcattcagatacctgtagctgacattactgttggagatattgctcaagtgaaatatggtgatcttcttccagctgacggcatacttattcaaggcaacgatcttaaaattgatgaaagctcattgactggtgaatcagatcatgttaaaaagtctttagataaggatcccttacttctatcaggtactcatgtaatggaaggctctggaagaatggtagttacagctgtaggtgtaaattctcaaactggaattatctttaccttacttggagctggaggtgaagaggaagagaagaaagatgagaagaaaaaggaaaagaaaaataagaaacaagatggagctattgagaatcgcaacaaagcaaaagcccaggatggtgcagccatggaaatgcagccattgaagagtgaagaaggtggagatggtgatgaaaaagataaaaagaaagcaaatttgccaaaaaaggaaaaatctgttttacaagggaaacttacaaaactggctgttcagattggcaaagcaggtctgttgatgtctgccatcacagttatcattctagtattatattttgtcattgacaccttctgggttcagaaaagaccatggcttgctgagtgcacaccaatttatatacaatactttgtgaagttcttcattattggagttacagttttagtggtcgcagtgccagaaggtcttccacttgcagtcacgatctcactggcttattcagtcaaaaaaatgatgaaagataataacttagtaaggcatctggatgcttgtgaaaccatgggaaatgctacagctatttgttcagataaaacaggaactttgacaatgaacagaatgacagtcgttcaagcttacataaatgaaaaacattataaaaaggttcctgaaccagaagctattccaccaaatattttgtcctatcttgtaacaggaatttctgtgaattgtgcttatacatcaaaaatattgccaccagagaaagagggtggattacctcgtcacgttggtaataaaactgaatgtgccttgttgggacttcttttggatttaaaacgggattatcaggatgttagaaatgaaataccagaagaagcactgtacaaagtctacaccttcaattctgttaggaagtccatgagtactgtcctgaaaaattcagatggaagttatcgaatattcagcaagggtgcatctgagataattctgaaaaagtgtttcaaaatcttgagtgctaatggtgaggcaaaagtattcagaccaagggaccgtgatgatattgtaaaaactgtgattgaaccgatggcatcagaaggcttgagaaccatatgtcttgcattcagagattttccagcaggagaaccagaaccagagtgggataatgaaaatgatattgtcaccggccttacatgcattgctgttgtggggattgaagatcctgtgagacctgaggtgccagatgcaattaaaaagtgtcagagggctggaattactgtgcggatggtcactggtgataatattaatactgctcgggccattgctaccaaatgtggtattttacatcctggggaagattttctgtgcctagaaggtaaagattttaacagaagaatacgaaatgaaaaaggagagattgagcaagagaggatagacaagatttggccaaaacttcgagtacttgcaagatcatctcctactgataagcatacactggttaaaggtataattgacagcactgtctcagaccaacgccaggttgtagctgtaactggtgatggtacaaatgatggcccagcactaaagaaagcagatgttggatttgcaatgggtattgctggaactgatgtagctaaagaagcatccgatattattctcacagatgacaactttacaagcattgttaaagcagttatgtggggacgaaatgtctatgacagcatctcaaaattccttcagttccaacttactgttaatgtagtagcagtgattgttgcttttacgggcgcctgcattactcaagactcaccgcttaaggctgtgcagatgctgtgggtaaacctcataatggatacactcgcttccctggctctggcaacggaaccacccactgagtctctcttgcttcggaaaccttatggtagaaataagcctctcatctcacgtacaatgatgaagaatattttgggtcatgcattctatcaacttgtagtagtctttacactcttatttgctggagaaaagttttttgacattgatagtggaagaaatgctcctttgcatgctcctccttcagaacattatactattgtttttaatacctttgtgctgatgcaacttttcaacgaaataaatgcccggaaaattcatggtgaaagaaatgtattcgaaggaatctttaacaatgccatcttctgcacaattgttttaggcacttttgtggtacagataataattgtgcagtttggtggaaaacctttcagttgttcagaactttcaatagaacagtggctatggtcaatattcctaggaatgggaacattactctggggccagcttatttcaacaattccaactagccgtttaaaattcctcaaagaagctggtcatggaacacaaaaggaagaaatacctgaggaggaattagcagaggatgttgaagagattgatcacgctgaaagggagttgcggcgtggccaaatcttgtggtttagaggtctgaacagaatccaaacacagatggatgtagtgaatgctttccagagtggaagttccattcagggggctctaaggcggcaaccctccatcgccagccagcatcatgatgtaacaaatatttctacccctacacatgtagtgttttcctcttctactgcttctactactgtggggtattcgagtggtgaatgcatttcgtagttctttatatgaagggttagaaaaaccggaatcaagaagttcgattcacaactttatgacacatcctgagtttaggatagaagattcagagcctcatatcccccttattgatgacactgatgccgaagatgatgctcctacaaaacgtaactccagtcctccaccctctcccaacaaaaataacaatgctgttgacagtggaattcaccttacaatagaaatgaacaagtctgctacctcttcatccccaggaagcccactacatagtttggaaacatcactctgattgtaagctgaatgttaacacactagctgcattgtaaagaaacaaattgaaactgggtcttttcacatattgtgatggacaagctagtattcttgtctttggacttcaacagaagacacacttgtacgaatgtagatttatttttttaaaaaaaaaaaagcaaagctttctgccagactgagggtgctttttggggggtgggagaaatgaactgacagataaacagtaactcagcgtaagtgacctgtggatcatcagtagtacccaagcatggtcctgaacagtgtattagcagagctttagtttatctcagtcctggatgggagagagagggaggagtaaaactgggcaagacaaagagccctggatcgttgaattgatagtttaatttctgctgttggctgttaataatttggattatttatgtttataaatgatacagatctgtttacaaggtttgtagatactttttttgttcctgttcatagatgggaagcttccttataactgatgcagagaaaaattagtccttcaaatactgctgtattttcaggaaaaaaaaaaaaaggggtgtttctattgaaactgtactaaatttttgcctacaatttaccttgttaaatattgtagataaattgctaatactaatagccaaatagataacactaatgctttgtttaaaaaaacgaaaaaaacaaaacaaaacaaaaaaacatgagcagtggtgttctaatgaagttatgacatctgtcctaattagtttcttaaatacatttactacttaatggttttgaagcaactgtttaatttttaaaatttttgaaaacttgctaataaccttttgttcagaatttagtagattgtttaatgcaggacatcaactacataatgaaagatgcttgaaatgcttttgttatttcaggcaaatcaaattaaatcagactatcaaactacaagagaaccttagtcttttttgtttttgtctaaacatgttagtttagtgatgtcttggtgaactgtgagtgaactgtattgatttttctaatctttagagaccttcacacagcatgagggctgttggcattttgaaaaaggttaataagtagaagcatacatgttttccttttgtttttgaaacttgtttgtaaacataaataaatatgcccttttattaaataaattcatggcaatgtttttttaaaagacatttcagcttctttactcagttctgcatatacagtgcatcagtctgttctctttgaccacaattggaatacatttcaagatggtaacagccccatgaagtaccgctttaattccttgctggtaatctaatagaatcagattaagaaaattaacacaattttaccatttgacatactcttcattgaatttagtttgtctaaaatagtctcacaggtaaaaaacataacaacaatgaccaccattgtctttgatacatttattttaattcttaagtggccaaataacagattaggtaaaatgagattacatgaaaaggttctaaaatgatatatttagatgcaataattaaccatatgctagaatgcccacctctaagccaattggattctttagctctctttttctttccttcatctaccttcttctcttttttgcctctgtctttaccctttagaaactggcatgtgttagggcccagatttcaccagatacacaatcctcaggctgacataaagtttacgaggactgctactataactgagagtgctgaccaagcaaagaaacatttagttgatggtgcttgatatttttggtgggtgggggaaatctttttctcaccatcaaatctttgcagtaatcctctgcaggtcttagaaacacattggctctgtcagcatttgtaattgtacatttattcatcaggtatttatagtgaatcatactgtaaaaaagaggtagcatgatatgctggaaagcatattagactaggagtcaagacctggtttctagtcttggttttgccattaatgtgctgcatgatcttgggaaaatcatttaccctaaataagggtggtggactatcttgaagaaccctttcaactctaaaaattgaccctatcaactggagagcccacaaggcatagggaatagagaaaagggaaatgttttcagttttcttttttattttggttatgcttaaatatgaatgtaattaccaaaagatttagaagtgcatgtgctttggaggatttgtattgagcttttacagtattcatttttcaactcaaggcaatggctttctacaccaactctaatccataaacgggtcttatgacatctatgaagtagtagcaagacatgcttagtgtgtatttctctctttgagacactgtaatttctaccagaaatttccagagcattatgtaggtagaaaaaaatgcaagcaagctgttaaagatcttggatcccattatatagtatgtatagctgaaatctgtaattcaatcactttttctcttttatcctctaaccaaaaaattgtttaattttgcatcccaaatgtttttaatctttgtatattttttaaaaatccttttctcctcatcattgccttttttgtggttgtaaatagacttacttgcactttgaagatgagttactccttgtcatcttacaaatatgtgatatggtaattttcataacagatgtcagttttgaaccaagaattggtgatttgtttataagaaaaaaactggcttcatttctgtgaaattgctctttgaaaatttctttttacacgtgtaagccaactgagataccgtgatggtgttgatttctttcaatgatgcttaccatctattttagccactgagccttttattatttgtctatttgtaaagtttatttgtcttaactcatttaataaatatactgtttatctgtttctgaaaaaaaaaaaaaaaaaaa

SEQ ID NO: 79 - DNA, 6686 bp, Human
gagccaccacccctgaccatgtagatgccagttccagggagcagcatgggccccactgaatggagactcctgggtctacagccctgagcccctccggcccctggacctcgtcccacaccggaggacacctcttggagctcaccaccactgtcaccagcccgcctcggccacccccaccccccgggacccggagtcggccgcctggtgccacagctgaccagtgagggtgtgctgaggacagccacaagcagccatcacccggcagcctcttgtccagcgctgacccttgggcccagcccgagcaaggaccgcagcaaacatgggtgacatgaccaacagcgacttttactccaaaaaccaaagaaatgagtcgagccatgggggcgagttcgggtgcacaatggaggagctccgctccctcatggagctgcggggcactgaggctgtggtcaagatcaaggagacttatggggacaccgaagccatctgccggcgcctcaaaacctcacctgttgaaggtttgccgggcaccgctccagacctggaaaagagaaagcaaatttttgggcaaaactttatacctccaaagaagccaaaaaccttcctgcagctcgtgtgggaggcgctgcaggacgtgacgctcatcatcctggagattgccgccatcatctccctggggctgtccttctaccacccgcccggcgagggcaacgaaggatgtgcgacggcccagggtggggcagaggatgaaggagaggcagaggcaggttggatcgagggggccgccattctcctctcagttatctgtgtggtcctggtcacggccttcaatgactggagcaaagagaaacagttccggggcctgcagagccgcatcgagcaggaacagaaatttaccgtggtccgggctggccaggtggtccagatccctgtggctgagatcgtggttggggacatagcccaggtcaaatatggtgacctcctccctgccgacggcctcttcatccagggcaatgacctcaagattgatgaaagctccctaactggagagtctgaccaggtgcgcaagtccgtggacaaggaccccatgctgctgtcaggaacccacgtgatggagggctcaggacggatgttggtgactgctgtgggtgtgaactctcagactggcatcatctttaccctcctgggggctggtggtgaagaggaagagaagaaagacaaaaaagccaaacaacaggacggggcagccgccatggagatgcagcccctcaagagtgccgagggcggcgacgctgacgacaggaagaaggccagcatgcacaagaaggagaagtccgtgctgcagggcaagctcaccaagctggctgtgcagatcgggaaggcgggcttggtgatgtcagccatcacggtgatcatcctggtgctctacttcactgtggacaccttcgtggtcaacaagaagccgtggctgcctgagtgcacgcccgtctacgtgcagtactttgtcaagttcttcatcattggcgtgacggtgctggtggtcgccgtgcccgaggggctccctctggccgtcaccatctcgttggcctattcggtgaagaaaatgatgaaggacaacaacctggtacgccacctggatgcctgtgagaccatgggcaatgccacagccatctgctcagacaagacaggcacgctgaccaccaatcgcatgacagtggtacaggcctatgtcggcgacgtccactataaagagatccccgaccccagctccatcaacaccaagaccatggagctgctgatcaatgccatcgccatcaacagcgcctacaccaccaagattctgcccccagagaaggagggcgccctgcctcggcaggtgggcaacaagacggagtgcggcctgctgggcttcgtgctggacctgaagcaggactacgagcccgtgcgcagccagatgccagaggagaagttgtacaaagtgtacaccttcaactccgtgcgcaagtccatgagcactgtcatcaagctgcccgacgagagcttccgcatgtacagcaagggggcttctgagatcgtgctcaagaagtgctgcaaaatcctcaatggggcgggagagcctcgtgtcttccggccccgcgaccgggacgagatggtaaagaaggtgattgagcccatggcttgcgatgggctccgcactatctgcgtggcctaccgcgacttccccagcagcccggagccggactgggacaatgagaatgacatcctcaacgaactcacctgcatctgcgtggtgggcatcgaggacccggtgcggccagaggtcccagaagccatccgcaagtgccagcgggcaggcatcacggtccgcatggtcactggcgacaatatcaacacggctcgggccatcgccatcaagtgtggcatcatccatcctggggaggactttctgtgcctcgagggcaaggagttcaacaggaggatccgcaacgagaagggggagattgagcaggagcgaattgacaagatctggccaaagctgcgggtgctggctcgctcctccccaacggacaagcataccctggttaaaggcatcatcgacagcacacacactgagcagcggcaggtggtggccgtgacgggggacgggaccaacgacgggcctgcactcaagaaggccgacgtgggcttcgccatgggcatcgcaggcactgacgtggccaaggaggcctcagacatcatcctgacagacgacaatttcagcagcatcgtcaaggcagtgatgtggggccgcaacgtctatgacagcatctccaaattcttgcagttccagctcaccgtcaacgtggtggccgtgattgtggccttcacaggcgcctgcatcacgcaggactcccctctgaaggccgtgcagatgctctgggtgaacctcatcatggacacgtttgcctcgctggcactggccactgagccgcccacggagaccctgctgctgaggaagccgtacggccgcaacaagccgctcatctccaggaccatgatgaagaacatcctgggccatgctgtctaccagcttgccctcatcttcaccctgctctttgttggcgagaagatgttccagatcgacagcgggaggaacgcgcccctgcattcgccaccctcagaacattacaccatcatcttcaacaccttcgtcatgatgcagctcttcaacgagatcaacgcccgcaagatccacggcgagcgcaatgtctttgacggcatcttccggaaccccatcttctgcaccatcgtgctgggcacctttgccatccagatagtgatcgtgcagtttggagggaagccattcagctgctctccactgcagctggaccagtggatgtggtgcatattcattgggttaggagagctcgtttggggccaggtcatcgccaccatcccgaccagcagactcaagttcctcaaggaggcaggcaggctcacacagaaggaggagatcccggaggaggagctcaacgaggacgtggaggagatcgaccacgcggagcgggagctgcggcggggccagatcctgtggttccgaggcctgaatcggatccagacacagatccgcgtcgtgaaggcgttccgtagctctctctatgaaggtttagaaaagcctgaatctcgaacctccatccataacttcatggctcatcctgaattccggatcgaagattcccagccccacatccccctcattgatgacaccgacctggaagaagatgccgcgctcaagcagaactcgagcccgccgtcatccctcaacaagaacaacagcgccatcgacagtgggatcaacctgacgaccgacacaagcaaatcagctacctcttcaagtccagggagccccatccacagcctggagacgtcgctttagctgaggaccctctcgcctgcccgcccgccctcatggaccccgctgccacccgctttccgggcacccatccatccaggcacccaactcacccaagcagcaacgagcaacaatcggaaaccaaatactggagagaaaaccaacgtttccacccacagaccctttctctggctgcgatgctgtttgaactctttttcacttcaaggcaaggggcgggatctccactgggggcttacgggagtgagcggttttcccaaaacaagcccttcctggctcccacccagacatggaccagccatgcacccgcccagccaccacgtcccccgcatgaatgtactgtacactttcaatcctccccttgtttggtttttgggggttggggaggggtttttgtttgtttgtttgttttcttaggcgggaactgcaaacagactcttttctgagactatttatccaatccactggtctgtgagtttttgaaatgcttgcacagcatggtctcagttgtatagattaatttaataactttttgaaattgcagagcttaactcgcctagtagatttgcaccaatggaaccgaagaacttcatagacactcacaaggttatatccatttctttgtatctatatcaacgtatacttttccgagactgtatacgtccatatagataggtagatatatatatatatatataaatatatatacatggatatataaagtttctttgccggcatgttgccttgtttccgcttaaattgctctattttaacttatttatgtcctaaaagaagaatgtaatttgtttacaaacctgtagataacgtctttggctatttgtatggtttaagaacactggtggctgagatgctataaaaacagctcggcccaacagacacttcccctgggttgcatcctggatgttttatgatagccatgctctgatttttgcctgctatttccgttcaataatgtcactaccgtgagaggctcaggcagaagccaaatgctaccgagttgccatcctgaggggtttaacaacatgctccgtagacgaagggagaggaggagagaaggcttcctgggtttgcaacactaacggccatccggcccaaggatgccaggatctgcaaagcactgctcgaagacttttctctcaatgaaactcgcttgagtttactaagagcatttcaaaaataggttctctttggcactgtctgtacagagattgaggtagtgttgaaatattataaatggtattgtgttgatttttttttttatttagtaacttacaggtttgtttccttattaatggcagcatctgagctgttggcatattggatgaggatcagtatggcttgctgcttttatttttatttttgaagaagaatagcctttttctctgcactatttagatccgaatgaaccttatgatgtgtatattgagatgtactcagtgtgattttaaaccaaattgtcttcctgtagtcacaatatatactgtagccttttaacagcaagtcttgctttcccaaacagaaagccattctgaaaccctacagtatcacaggtgagaaaaggtggttattttttccccaagacaacagcactagtaatcccacttaataagagcttatttaattggatgtcagcctcttaactgctaagcactttgtgggtctcagcgtttttcataaaagaacttttgtatttaatacaaagtttgctttgagacttttcagcatatgatcttttttccataaacttgtacagtgcaaaagacattttgaataccatgatcgatgatgtcccatgcttcgaggaaaaccaaacactttccgcctctcttgcaaaatccattcctcatgctgaccctcctcacgatggctgtgtcagcccagccccttcccttctccaggcccagagaactcttccacaaacaagatgagagccactcgggaaaagagccatagtcaactgggagggcctacatctggatggcggtggaaaaacttgagggtttggggttcaaagtcagcccatcccacctggcaaaatcctcctggaaggaggaccttcaagagcgcatcacctgaatgtcgtgaagaagtatctctgaatgtatccaggagaggaactgcataaccaaaggggtgaccagccctcagatgtgcttattggattccagtacaaacgccaccaaagccagcccactgctctcctacaaggaaggaaagatctgcacgtgtaaaacatggggcagccttggaacatggtgttttttggagtttcctttctcacagttttccatctccccacttctttgatcagtcatgtgtccgtgacctcgttccatgacatcaggatagctgtgtttgcacaccatgctccatgttcattcggagccaggaggggttctcagtggagcctggcttagggaacagggagcgatggaagaatgccaacattagcgttggtcttctcttgtcaggaatgaaggatgcttgcacacatgcaccccctcactctcacacttgcacacatacacacacacacacacgaaatggttggtttgtcaaaactcactgtagtacataaagcttgcactctgcgtcctatatctagcagcatggggtacgtttggcagttcactccattagggggtaaataatttatgaccattcatctgtttttatgaatttttttatctagacaataatgtaaataaagaactcaccatctctgttcatttaatactaaaaaaaaaaaaaaaaa

SEQ ID NO: 80 - DNA, 6592 bp, Human
gtgtccacgcttagcagctttctcaccgccgccaaaccttgcctgggcactgggaccgtgggtggccgcctgtccctagctgtggctgagccaagattgcacttgtgagaaggcctgacaggcagcatgggcgacatggccaatagttccatcgagttccaccccaagccccagcagcagcgggatgtcccccaggctggaggctttgggtgcacgctggcggagctgcgcaccctcatggagctgcgaggggccgaggcgctgcagaagatcgaggaggcctacggggatgtcagcgggctctgccggaggctgaagacctcacccacagagggcctggcggacaacaccaatgacctggagaagcgcaggcagatctacgggcagaacttcatccccccaaagcaacccaagaccttcctgcagctggtgtgggaggccctgcaggacgtgaccctcatcatcctggaggtggctgccatcgtctctctgggcctctcgttctatgcgccgccaggagaggagagtgaagcctgtgggaatgtgtcgggaggcgcagaagatgagggcgaggccgaagctggctggatcgagggggctgccatcctgctgtccgtcatctgtgtggtgctggtcacggccttcaatgactggagcaaggagaagcagttccgaggcctgcagagccgaattgagcaggagcagaagttcacggtcatccggaacgggcagctcctccaggtccccgtggctgcgctggtggtgggggacattgcccaggtcaagtacggcgacctgctgccagccgacggcgtgctcatccaggccaatgacctcaagatcgacgagagctccctgacgggcgagtctgaccacgtgcgcaagtcagctgacaaagatcccatgctgctctcaggcactcatgtcatggaaggttctggaagaatggtggtgaccgccgttggcgtgaattcccagacaggcatcatcttcacgctgcttggagctggcggagaggaggaagagaagaaagataagaaaggcaagcagcaggatggggccatggagagtagccagaccaaagctaagaagcaggatggtgcagtggccatggagatgcagcccctgaagagcgcggagggtggggagatggaggagcgggagaagaagaaagccaacgcacccaaaaaggagaagtctgtccttcaggggaagctcacaaagctagccgtgcagatcgggaaagcagggctggtgatgtctgccatcaccgtcatcatcctggtcctctactttgtgattgagacgtttgtcgtggaaggccggacatggctggcagagtgcacgccggtctatgtacaatacttcgtgaagttcttcatcattggtgtcactgtgctggtcgtggctgtcccagagggcctgcctcttgctgtcaccatctccttagcttactctgtcaagaaaatgatgaaagacaacaacctggtgcgccacctggatgcctgcgagaccatgggcaacgccacagccatctgctccgacaagacgggcacgctcaccaccaaccgtatgaccgtggtccagtcctacctaggggacacccactacaaagagattccggcccccagcgccctgacccctaagatcctcgacctcctggtccatgccatctccatcaacagtgcctataccaccaaaatactacctcctgagaaggaaggcgccctcccacgccaggtgggcaataagacggagtgcgccctgctgggcttcgtcttggacctgaagcgggacttccagcccgtgcgcgagcagatcccggaagacaagctttacaaagtgtacaccttcaactcggtccgcaagtccatgagcacagtcatccgcatgcccgacggtggcttccgcctcttcagcaagggggcctcagagatcctcttgaaaaagtgcaccaacatcttgaacagcaatggcgaactccggggctttcggcctcgggaccgggacgacatggtgaggaagatcatcgagccgatggcttgcgatggcctccgcaccatctgcatcgcctaccgggacttctctgcaggccaggagcccgactgggacaacgagaatgaggtcgtgggtgacctcacctgcatagctgtcgtgggcattgaggaccctgtgcggcccgaggtccctgaagctatccgaaaatgccagcgtgctggcatcacagtccgcatggtgactggggacaacatcaacacggcccgggccatcgcagccaaatgcggcatcatccagcccggggaggacttcctgtgcctagaagggaaggagttcaaccggcggatccgcaatgagaaaggcgagatagaacaggagcggctggacaaggtgtggcccaagctgagggtgctggcccggtcgtctcccaccgacaagcacacactggtcaaagggattatcgacagcaccactggtgagcagcggcaggtggtggctgtgacaggggatggcaccaacgatgggccggccctcaagaaggcggacgtgggcttcgccatgggcatcgcagggaccgacgtggccaaggaggcctccgacatcatcctgaccgatgacaacttcaccagcatcgtcaaggcagtcatgtggggccgtaacgtctatgacagcatctccaagttcctgcagtttcaactgacggtcaatgtggtggctgtgatcgtggccttcacaggtgcctgcattactcaggactctcctctcaaagccgtgcagatgttgtgggtgaacttgatcatggacacatttgcctctctggccctggcgacggagccacccacagagtcgctgctgctgcggaagccgtacggccgcgacaagcccctcatctcccgcaccatgatgaagaacattctgggccacgccgtgtaccagctcgccatcatcttcaccctgctgtttgtcggggagctcttcttcgacatcgacagcgggaggaatgcgcccctgcactcgccaccctcagagcactacaccatcatcttcaacacgttcgtcatgatgcagctctttaacgagatcaacgcccgcaagatccacggcgagaggaacgtgttcgacggcatcttcagcaaccccatcttctgcaccatcgttttgggcactttcgggattcagattgtcatcgtccagtttggcgggaagcccttcagctgctccccactatccacagaacagtggctctggtgcctgtttgttggtgttggggagctggtctggggacaggtcattgccaccatccccaccagccagctcaagtgcctgaaggaagccgggcacgggcccgggaaggacgagatgaccgacgaggagctggccgaaggcgaggaagagatcgaccatgccgagcgggagctccgcaggggccagatcctctggttccggggcctgaaccggattcagacgcagatggaggtagtgagtaccttcaagagaagcggttcagttcagggtgctgtgcgccggcggtcttcggtcctcagccagcttcatgacgtaaccaatctttctacccctactcacgcaattctctctgctgccaatcctaccagtgctgctgggaatccgggtggtgaaagcgttccgtagctcgctctatgaaggcctggagaaaccagaatccaagacctccattcacaacttcatggccacgcccgagtttctgatcaatgactacacccacaacatcccgctcattgacgacacggacgtggacgagaacgaggagcgcctccgggcccccccgcccccgtcccccaaccagaacaacaacgccatagacagcggcatctacctgaccacgcatgtcaccaagtcagctacctcttcagtgttttcctccagtcccgggagcccgctccacagcgtggagacgtccctctaacaagaacttgtctcagcacatgcgcacacgcacactcggactcacacgaagtcacacgcacacatgcacgcacacacacatatggggacctgcacacctgcaaaacgagggaacaactaaggtggctgaagacctttctggcagggcatttgcaaggacccaaatccattcaacaagggtgcagcctgccacaggctcctcatccggactgaggaagacgaggacagggaggaggaaaaggaggaagaggaggacaaaaagggggaggagaaggttcttcgtccaaaggaggaaggagaagaagtagaaagtgcgaagagctgagttccccacctttttttctattgatgcttcttttttaacaaactacagttttaccgtgtgtttgccatttgagctgtgtggtgggcagggggctggtttgggtttatggggagcttttgttgcacccatgcaggggcaatcagatcagcatcttcatgcaaaaaaaaaaaaaaagttgagtgctctgcaggcctgtgaagggtgccacctgagggagccgcctgcaagcggccctgcagccacaaagcaacccgccctctgcaaaaactaggcacatccgcagtgcgcatgtgtgtgcgtgcatgcacatatgtgtatgtgtgtggatctgtacacacacacgtatatatggccagatgcgtatttcaataaggaactatttactggcatgatatttgcattcctcttatcaggcattttcatttggaaatttcattattgaatgtagcaaggttgtagttgtttttttttttttttcagggaactagactgcaagaatatctttctggtcaacccatttttgtccctcatcaccccgcccccacctttcgctcctgccctctgcccggccctactgagattcccaaggagaaggccgagagggggcgctccaggtctggagcaggtataattggagcatttgcactgagacccctgccagagaggagaaaaccctttcaagggaaattttaatctaaaaggaaaaaaccaaaatattgatgagaaggagtcctccagttagtgaaaggggagtttcgttttcagctttctttggttcctactccaattccacatccttcatcctggccatgcccccaccttcaagagcatgaagcactcttggagttgtgggtcctgcccagagtccagagagcagcctcagctgagcacaggtccgagggggcgggggcagggccaagagttcaaaagaagccaatggagggagagggagcgtcagaagcccggaggagctggtggtgggagaatgacggcagggacgcagccacagttcagaccctgtcccctcagcacctggatggactcccactgtttgctttggcaaatgccgaggagtcctcggtagaccaccttgatgtctgctgtgacatcagaggtgccaccaccaaagcactcttcccaccctagtctttgtgtccagcggccaagcttaagccatgaagtcatggatttgtggctcagcaccaggtcccgaggggagcctatcctggcagtgtgggcacctggtggccaagcctcagtttcccccaaatgagcaaaggggataaagaggggcccgacttttgccaccctcctgaggaagcccctaggtccacacagtgatgccatgggggacccttgccttccacacttgcaggtgtcacgttttgcagggaggtgtttgggcctggggctcagccactgggagacagttgggacctgagggacagaggatcggaatggaaaccaccaacgtgcactggcaccctcagaaggcttgtctcacctccaccggcatccacacaaaaccaaacaggagcaggcgtcatccccactattcccatgaatgccatgtcacccctgagcagaagcagtcaaatcttgggcaaaagaatttcggttagaaaagaaaatcccactttaaaatgccagctgcagataactcaaagccatcccttttttctaaagggcacattgagaatgtcacccatttgtaaactgttccctgatgtccttgtttaaacgataataagaaaaagggcaactccatttgttgagggtctttgtgttcttcaatgagaaatcaaatttgagacgttgaaattggagctgcgtgctgctgcactcaccggcttcttctcactctctgtcgtagacacaccgataggaccaatggccaatagatattaaaagcaaaccctcactgctgctgtataaagttgcctaatgtaaatgtctattgtttagtccctaggtcacctttgtgctgtgctgtggagttcagaaacggggtaccatgacctggaatcttttgctcttgtttttgcagtcttcaaggctgggggccctgtctcattgggaagcccctctttataaagcattatattacttggaatggcttggtcaactgtgttcagttcataaatatgttttacatttttatctgcctgttataaagatgaacaaaaaaacttaatgagaaagatcacagatacgtaataatttaaagtctgtagttgaatttcctaacttaaagaatagaccaaaatttctgtgtataaaaaaaaatgaaaggctccttacatcctgaaaaaaaaaaaaaaaaaa

SEQ ID NO: 81 - DNA, 8733 bp, Human
ttggggagagctggtgagcaagagtctggcccgagttagctagagctgttgccatgacaagcattttcttaagaaagctctgctgttgagatcgtccaaagctgggggctgggagggggggcacgaacttcgtggggcaccatccctccgaagagagcaagatcagagacacccgcccagctctcctgcaccctttttctttcaggaacctgagaggtccttcccattggaggggcagggggaggagacccagcccactccccggccttagccagaaaggcaagagagcaaagccagcgtctctagcttggttgccacactggggagactggtgggtggtcaccccaccctaccctcatccatggaaacccggagggagagtcccgcctgaagaaacctggatctttgctagaaagagagagatccagttgtcatcggtatccaggaagctctcctcttcctcctcctgacgtctaccactacagttgctggttgttgctaaggttgctgccatggtaacatgcacatcctgtttacaccttcatctgggcaagttggtctaagctaggaacctacctaccctggacaaccactatcatcaccacctggggacaccaatcatcgtgacacggagtccaccttccactcagttcccccatcctcttcctcctctcgctgccagacttcatacggaagaaaggatctagacttcggacggctactcgggagcttattgcacaagatatattcaatctattccctcactgggcccccagagaagcaagaagtaggaagaagttgagacagggaggcaggagacactggtcagttgaagggaaacgctacatcttctctggttgaggggcttggtaacagcaggcaaaatgacgaacccatcagaccgtgtcttgcctgccaactcgatggccgagagccgtgaaggggactttggctgcacagtaatggaactgaggaagctcatggagctgcgttcaagggatgcactgacccagattaatgtccactatggaggtgtacagaatctctgcagtagactgaaaacctcccctgtggaaggtctgtctgggaaccctgcagatctggagaaacgtaggcaggtgtttggacacaacgtgatcccccccaaaaagcccaagactttcttagaattagtgtgggaagctcttcaagatgtcacgctcatcatcctggagattgcagccatcatctccctggtcctgtccttttatcgccctgctggtgaagaaaatgaactgtgtggtcaagtcgcaactaccccagaagatgaaaatgaggcacaagctggctggattgagggggcagccatccttttctcagtgatcatcgtggtgttagtgactgcctttaatgattggagcaaagagaagcaattccgggggctgcagtgccgcattgaacaggagcaaaagttctccatcatccgaaacggtcaactcatccagctccctgtggctgagattgtggttggtgatattgcccaagtcaaatacggtgatctgctgcctgcagatggaatcctgatccaagggaatgatctgaagattgatgagagctctctgacaggggaatctgaccatgtcaagaagtccctggacaaagaccccatgttgctctcagggacccatgtcatggaaggttctggccggatggtggtgacagctgttggtgtcaactctcagactggaatcatccttactctcttgggggtcaatgaggatgacgaaggggagaaaaagaagaaaggtaaaaaacaaggagtccctgaaaatcgcaacaaagcaaagacccaagacggagtggccctggaaatccagccactcaacagccaggagggaatcgacaatgaggaaaaggacaagaaggcagtcaaggtgcctaaaaaggagaagtcagtgctgcagggcaagctgactcgcctggctgttcagattgggaaagccggtctgctcatgtctgctctcacggttttcatcctgattctatactttgtgattgacaactttgtgataaatcgcagaccatggctccctgagtgtactcccatctacatccagtactttgtcaagttcttcatcatcggcatcactgtactggtggtggctgtgccagaggggctgcctctggctgtcaccatctcactggcctactctgtgaagaaaatgatgaaagacaataacctagtacggcacttggatgcttgtgagaccatgggcaacgccaccgccatctgctctgataagacaggcacgttgaccatgaaccgcatgactgtggtacaagcttatattgggggcatccattaccgtcaaatcccaagccctgatgtcttcctgcccaaagtcctggacctcattgtcaatggcatttctatcaacagtgcttatacctccaagattctgcctccagagaaggagggaggcctgcctcggcaggtgggcaacaagaccgagtgtgctctgctaggctttgtcacagatctgaagcaggattatcaggctgtgcgtaatgaagtgcccgaggagaagctctacaaggtgtacacctttaactcagtgcgcaagtcaatgagcaccgtcatcaggaatcccaacggtggcttccgtatgtacagcaagggcgcctctgagatcatcttgcgcaagtgtaatcgaatcctggaccggaaaggggaagcagtgccattcaagaataaagacagagatgatatggtacgcactgtcatcgagcccatggcctgtgatggactccggactatctgcatagcttaccgggacttcgatgacacagagccctcttgggacaatgagaatgagatcctcaccgaactgacctgtatcgcggtggtgggcattgaggaccctgtgcgcccagaggtgccagatgctattgccaaatgcaaacaagctggcattactgtcagaatggtgacaggtgacaacatcaacacagcccgggccattgccaccaaatgtggcattctgacacctggggatgacttcctgtgcttagaaggcaaagaattcaaccggctcatccgcaacgagaaaggcgaggtagagcaagaaaagctggacaagatctggcctaagcttcgggtcctggcgcgatcttctcccactgacaagcacaccctggtgaaaggcataattgacagcactgttggggaacaccggcaggtcgtggctgtcactggtgatggcacaaatgacgggcctgctctgaagaaagcggatgttggttttgccatgggcatcgcaggcacagatgtagcaaaggaggcttcagacatcatcctaacagatgacaacttcaccagcattgtgaaggcagtgatgtggggacgaaatgtctatgacagcatctccaagttcctgcagttccagctcactgtcaatgtggtggccgtgattgtagccttcactggagcctgtatcactcaggattccccattgaaagctgtgcagatgttgtgggttaatctgatcatggacacttttgcttcattggccctggccacagagccccctacggaatctctgttgaagcggcgcccctatggccgaaataagcctctgatctcacgcactatgatgaagaacatcttgggccatgcattctatcagctcattgtcatctttatccttgtctttgcgggtgagaaattctttgatattgatagtgggaggaaggcacctctacattcaccacccagccagcactataccattgtttttaacaccttcgtgctgatgcagctcttcaatgaaatcaactcccgaaagatccatggagagaagaacgtcttttcaggcatctaccgcaacattatcttctgctctgtagtcttgggcacattcatctgccagattttcatcgtggaatttgggggtaaacccttcagttgtacaagcctcagcctgtctcagtggctgtggtgtctcttcattgggattggagaacttctgtggggccagttcatctccgcaatacctacccgatccctgaagttcctgaaggaggctgggcatggcaccaccaaagaggagatcaccaaggatgccgagggactggatgagattgaccatgctgagatggagctgcgccgaggccagatcctctggttccggggcctgaaccgtatccagactcagatcaaagtggtcaaagcgttccatagttccctccacgaaagcattcagaaaccctacaaccaaaagtccatccacagcttcatgacccaccctgaattcgccatagaggaggagttgccacgaacaccactcctggatgaggaagaggaggaaaatcctgacaaggcttctaagtttgggactagggtgctcctgttggatggtgaggtcactccatatgccaatacaaacaacaatgcggtggattgcaaccaagtgcagctcccccagtcggacagctctctacagagcctagagacatcagtttgaattttctttctctgactctcatccctattttacctatttccattttcgtctatcccatctatgaggtgatgatgggacttttcattgtcacgtcagctgctgtgttaacagcagtgtgtgtgaagtgaacctctacctgaccatgaagaggcaagagcacagacttacaaggatttcaacttaagcttgacttggggtttgtagcgggacccagtcaaaccccattcaggtcatggtagaatctactccttggtagtcacttgtcatttttaaagaaatgatgacaatcctcttggcatcaccccaccccacattctccccgatgttcctctcctgaattctggattttgtcctacaagtctgtgccatttataagctaagttgagggttcagagggagacaaatatccccaagtgaaatatgttgcggtagagatggaatgtataaaatccgccagtagtgtgattgtttttcaatttttcccactttgaaaacttacacctaaaggcctgtaggcctctaactctttctgccctttcattcaaacctctccaaagttctttgtcttttgtcttcccttcctttccttttttttttttttttttatgatgattaagaaaatggaaaggatatggatgaattgtgtaaacttagatccttctcccttttggcccaaaagaacccttgatttagttccagaatccaaccagtttctttgttaaaagggtccttttgaagcaattaagtgctggtaagaatatttctctgttgttgccaggttaccttctgcttttaaattgccatcttgtaaagtgtatgtggttcttaagtgccagggagatcagccttgcccatgaaggttgcatatgtgtggtatacagtttttacctgaaagcctgagctttctcttattcctaaagtggtggcaaaagaatgaactgggtatgaccctgcccccttactgggcttggatattgaggaccagacgctgccaaatctaggacaagacagaccatcaaagcagacttttgtgggctcctctttggggtgaccactgctttcaaagccatctgccaaggctctccagggcaggacctgactggtggggaatgagtgttcagaagccttgggagaggccaaagagccattctagcatgatctgagaaaaccttcctgcagaggccagaaaccttgagcttaggtgcctggggaccagcttcgacattctctccagtttctgattctaatttttgccacgtgtcacaacttttccagtctctgagaaggtcccagcctttctcaaatattctgattttgaaaatatgtatccaaagtgggaggcccctgtgacattttgccaacttaaacgagaaaaagaccccccgcacccggcacactcccccttcctccagccccgcttcagccacatgctccagctgctgcccagtaaagccctgtgcctttttttcccctgaatactgcccaaagcatccccttcccatctgcctctcaggagttggggactttgctaggagattttttaagtgttccttactgggacaacgtggagccacgtttgcaggagctccatttgtatccctgctggtgttgacttctgtgtaggggccagttcatgtccctgactctcacctcccattagataaatgaagcccacccccctttctagagtgatgagagtcaagaagaggggatgtatgaacggccaaattcccatgtgagaggaagatgacctgatccacctagccttttcttctggatctgtcctccctcacccctttcacctgagctgtccacagtaggaaacataaagaaacaatgtcccctacatatccccatgactacataatccatcatcgtaggaaataggaaagcaaatttgattttggttttgtaaaacgtacatgcttcaataattcttttttgtgtcttaaatactcataggggaaaaaaacagctcacccaaggtgttaggtttcacatatatattcatcaactattttagaagatttaattctatcaaatcttgtattacctcagatcattttaaatagcaagccaataacgagctttgaaggctattttaccattcctgttcacaaaaggttctcatggtgcctgacaggttacccttgagggcttgtgtctactttttaaaagtcaatggttttttttcttgtgttctagtttccataataggagagaaaatatagaaatatatgcaaaaattatagttttctttagatcagaaactgatatttttgggtcagccatatgtattttgtttaaaggatttaaaataaagtgccgtcatgtagccctgtggaagggagcacataaccagctgtttggcatgacaggtgacttagtatatttgtaattggttttaaaaccaatacaccatactttctttctgcaaacagccatctttatacttagggaagaaaaattgttgggttctagacttttttaatataaattttgttgatatggaattaggtaagtttaagtgtctatgtgcatatgttttttatataagttttttctattcagtttcactgatccaactggcagtgggtaaatatggcataagttaataacacttttccccaaaatggtgctttggatttgaaaagggtctgatggggagaaggagaacgtatcatcctagcttcctctcttaataaacctagaaaaacgggtagtaaactgtggatagtcaggaaaacacccagcaagggacacagctgtcaggaaatgaatcttccccccaacccccaccatgcagatggatagacagaatctttcctgactagtcattaggatcaggggcctctgttggatttgtgtttcttgaagaatagctggcagagtggtataaaagacacgaatatctcctggtctataaggatactctgatttggggtttgcatttttcatggtttttatttcctgttccccctggagttttccattagtgagtttttgtgcaaggatcttatttgtgatgccttccctcccctagaaagattttgtgcaatatattaaatggggacagaattctaaatggataaaacaatggctggttctagccctgagtgacagtcttaaggctagatccttcccatagtatcatctgtcctctggaatgactctcctgtccctaaaggggttaagagagagatcacctagaaatccctctggacacttgtgggttctttagggtttgagtttcttcttccccttgagcttcagagaggagagttggcatggttaaatctgaatggttacctcactgctgaaaacccagaggggcgtggcacactcgcttgtgtggaaaagcctctaaatgcatcccttcctttctttcctgcttcctttgccttacaattgaagcagcccgtggtaccatcacagtatgcagagacttcctcacctttcatatctagggaccacccccgatgcattggtgagggtgggcacttataaatgcctgctattgttaagccattccagcctcttcctctgaatagaccagacgccctttcacttagttcagtgccagtccttttgccttcccaaccctgctgttaggcctgctgttccctttgctcttgattaggagagatggaaggagatgagctcccataactgaattggcctttggttcatgttttctccccatatgtatatatgccatatgtgaatatgccatatatatgtgccaacaaatctatctacgttgttcttttcaaattagcacgcagataggaattttgagtttcttcttcttttagtaactagtataacaagcactggtatttttgtacaaaaaagaaaaacaaaagattgactattgtggtctgcatgacataaacaaacaaatggtgatatcaaagcaacgtataccccagtccagtgtgtgttgccataatttgcaattcagcttaacagtgcacccaatctatatttgcattttgatattatttaagctctatgtacaaggttttgcatgtatttatatggttcttagggaaaaaaaatgctataaactgcaaatctgaaattcaaatgtgttgttccactgagaccagaagaagaagaggagttttaaaagggataatttgttggagccaataaagctttttgctgatgaacagaaaccaatactgctgtgcactgagaataaaaactcatgcccacttgtaaaaaa

SEQ ID NO: 82 - DNA, 4567 bp, Human
gacagcctctgggtcctcggtcggtacagtctctgcacctcgcgccccagcaggtaaactaacattatggatttttccaagctacccaaaatactcgatgaagataaagaaagcacatttggttatgtgcatggggtctcaggacctgtggttacagcctgtgacatggcgggtgcagccatgtatgagctggtgagagtgggccacagcgaattggttggagagattattcgattggagggtgacatggctactattcaggtgtatgaagaaacttctggtgtgtctgttggagatcctgtacttcgcactggtaaacccctctctgtagagcttggtcctggcattatgggagccatttttgatggtattcaaagacctttgtcggatatcagcagtcagacccaaagcatctacatccccagaggagtaaacgtgtctgctcttagcagagatatcaaatgggactttacaccttgcaaaaacctacgggttggtagtcatatcactggcggagacatttatggaattgtcagtgagaactcgcttatcaaacacaaaatcatgttacccccacgaaacagaggaactgtaacttacattgctccacctgggaattatgatacctctgatgttgtcttggagcttgaatttgaaggtgtaaaggagaagttcaccatggtgcaagtatggcctgtacgtcaagttcgacctgtcactgagaagctgccagccaatcatcctctgttgactggccagagagtccttgatgccctttttccgtgtgtccagggaggaactactgctatccctggagcctttggctgtggaaagacagtgatatcacagtctctatccaagtattctaacagtgatgtaatcatctatgtaggatgtggtgaaagaggaaatgagatgtctgaagtcctccgggacttcccagagctcacaatggaggttgatggtaaggtagagtcaattatgaagaggacagctttggtagccaatacctccaatatgcctgttgctgctagagaagcctctatttatactggaatcacactgtcagagtacttccgtgacatgggctatcatgtcagtatgatggctgactctacctctagatgggctgaggcccttagagaaatctctggtcgtttagctgaaatgcctgcagatagtggatatccagcctatcttggtgcccgtctggcctcgttttatgaacgagcaggcagggtgaaatgtcttggaaatcctgaaagagaagggagtgtcagcattgtaggagcagtttctccacctggtggtgatttttctgatccagttacatctgccactcttggtatcgttcaggtgttctggggcttagataagaaactagctcaacgtaagcatttcccctctgtcaattggctcatcagctacagcaagtatatgcgtgccttggatgaatactatgacaaacacttcacagagttcgttcctctgaggacgaaagctaaggaaattctgcaggaagaagaagacctggcagaaattgtacagcttgtgggaaaggcttctttggcagaaacagataaaatcactctggaggtagcaaaacttatcaaagatgatttcctacaacaaaatggatatactccttatgacaggttctgcccattctacaagacagtagggatgctgtccaacatgattgcattttatgatatggctcgtagagctgttgaaaccactgcccagagtgacaataaaatcacatggtccattattcgtgagcacatgggagacatcctctataaactttcctccatgaaattcaaggatccactgaaagatggtgaggcaaagatcaaaagcgactatgcacaacttcttgaagacatgcagaatgcattccgtagccttgaagattagaagccttgaagattacaactgtgatttccttttcctcagcaagctcctatgtgtatattttcctgaatttctcatctcaaaccctttgcttctttattgtgcagctttgagactagtgcctatgtgtgttatttgtttccctgtttttttggtaggtcttatataaaacaaacattcctttgttctagtgttgtgaagggcctccctcttcctttatctgaagtggtgaatatagtaaatatacattctggttacactactgtaaacttgtatgtagggtgatgaccctctttgtcctaggtgtaccctttcctcatctctattaaattgtaaacaggactactgcatgtactctctttgcagtgaatttggaatggaaggccaggtttctataacttttgaacaggtactttgtgaaatgactcaatttctattgtggtaagctcattggcagcttagcattttgcaaaggaattgctttgcaggaaatatttaattttcaaaaacataatgattaatgttccaattatgcatcacttcccccagtataaatcaggaatgtttgtgagaaaccattgggaactatactctttttatttttattttttattttttttattattttttttttggggacggagtgtccctcttgttgcccaggctggagtgcaatggcgtgatcttggctcactgcagccttcgcctcccgggttcaagtgattctcctgcctcagcctcccgagtagctgggattacaggcatgctccaccatgcccagctaattttgtatttttagtagaaacggggtttcaccatattggtcaggctggtctcgaactccagacctcaggtgatccgcccacctcggcctcccaaactgctgggattacaggcgtgagccaccgcgcctggccagggactatactctttttaaaatagacatttgtggggctcacacaatatatgaaatagtaccctctaaaaaagagaaaaaaaaaatcaggcggtcaaacttagagcaacattgtcttattaaagcatagtttatttcactagaaaaaatttaatatcaaggactattacatacttcattactaggaagttctttttaaaatgacacttaaaacaatcactgaaaacttgatccacatcacaccctgtttattttccttaaacatcttggaagcctaagcttctgagaatcatgtggcaagtgtgatgggcagtaaaataccagagaagatgtttagtagcaattaaaggctgtttgcacctttaaggaccagctgggctgtagtgattcctggggccagagtggcattatgtttttacaaaataatgacatatgtcacatgtttgcatgtttgtttgcttgttgaatttttgaacagccagttgaccaatcatagaaagtattactttctttcatatggtttttggttcactggcttaagaggtttctcagaatatctatggccacagcagcataccagtttccatcctaataggaatgaaattaattttgtatctactgataacagaatctgggtcacatgaaaaaaaatcattttatccgtcttttaagtatatgtttaaaataataatttatgtgtctgcatattgcagaacagctctgagagcaacagtttcccattaactctttctgaccaatagtgctggcaccgttgcttcctctttgggaagaggaaagggtgtgtgaacatggctaacaatcttcaaatacccaaattgtgatagcataaataaagtatttattttatgcctcagtatattattatttaattttttaggtaatgcctatctcttggtctattaaggaaagaagcaatcagtagagaattcaggatagttttgtttaaattcttgcagattacatgtttttacagtggcctgctattgaggaaaggtattcttctatacaacttgttttaacctttgagaacattgacagaaattatgcaatggtttgttgagatacggacttgatggtgctgtttaatcagtttgcttccaaagtggcctactcaagaggccctaagactggtagaaattaaaaggatttcaaaaactttctattcctttcttaaacctaccagcaaactaggattgtgatagcaatgaatggtatgatgaagaaagtttgaccaaatttgtttttttgttgttgttgttgttttgaatttgaaatcattcttattccctttaagaatgtttatgtatgagtgtgaagatgctagcgaacctatgctcagatattcatcgtaagtctcccttcacctgttacagagtttcagatcggtcactgatagtatgtatttctttagtaagaatgtgttaaaattacaatgatcttttaaaaagatgatgcagttctgtatttattgtgctgtgtctggtcctaagtggagccaattaaacaagtttcatatgtatttttccagtgttgaatctcacacactgtactttgaaaatttccttccatcctgaataacgaatagaagaggccatatatattgcctccttatccttgagatttcactacctttatgttaaaagttgtgtataattgttaaaatctgtgaaagaataaaaagtggatttaaattaaaaaaaaaaaaaaaaaaaa

SEQ ID NO: 83 - DNA, 3054 bp, Human
gcctcccagcacgctggtcagctcctcttgctcgcaagcaggtctggccccagcggcgcgaagtcacgaggctgggggcggccggcggcgaagggggcggggcgaggccggggcgccgcagcgcgcataggcggagcctcgggccgcgggccgccttggtatatctgcgcgtgcgcggcgtcgctgctgggccagtcgggacagaggagacaagatggcgctgcgggcgatgcgggggattgtcaacggggccgcacccgagctacccgtgcccaccggtgggccggcggtgggagctcgggagcaggcgctggcagtcagtcggaactacctctcccagcctcgcctcacatacaagacagtatctggagtcaatggtccactagtgatcttagatcatgttaagtttcccaggtatgctgaaattgtccatttgaccttaccggatggcacaaagagaagtgggcaagttctggaagttagtggttccaaggcagtagttcaggtatttgaagggacttcaggtatagatgctaagaaaacgtcctgtgagtttactggggatattctccgaacaccggtgtctgaggatatgcttggtcgggtattcaatggatcgggaaaacccattgacagaggtcctgttgtactggccgaagacttccttgatatcatgggtcagccaatcaaccctcaatgtcgaatctacccagaggaaatgattcagactggcatttcggccatcgatgggatgaacagtattgctagggggcagaaaattcctatcttctctgctgctgggctaccacacaatgagattgcagctcagatctgtcgccaggctggtttggtaaagaaatccaaagatgtagtagactacagtgaggaaaattttgcaattgtatttgctgctatgggtgtaaacatggaaactgcccggttcttcaaatctgactttgaagaaaatggctcaatggacaatgtctgcctctttttgaacttggctaatgacccaaccattgagcgaattatcactcctcgcctggctctaaccacagctgaatttctggcgtaccaatgtgagaaacatgtattggttattctaacagacatgagttcttatgctgaagcacttcgagaggtttcagcagccagggaagaggtacctggtcgacgaggttttccaggttacatgtatacagatttagccacgatatatgaacgcgctgggcgagtggaagggagaaacggctcgattactcaaatccctattctaaccatgcctaatgatgatatcactcaccccatcccagacttgactggctacattacagaggggcagatctatgtggacagacagctgcacaacagacagatttatccacctatcaatgtgctgccctcactatcacggttaatgaagtctgctattggagaagggatgaccaggaaggatcatgccgatgtatctaaccagctatatgcgtgctatgctattggaaaggatgtgcaagccatgaaagctgtcgttggagaagaagcccttacctcagatgatcttctctacttggaatttctgcagaagtttgagaggaacttcattgctcagggtccttacgaaaatcgcactgtctttgagactttggacattggctggcagctactccgaatcttccccaaagaaatgctgaagagaatccctcagagcaccctcagcgaattttaccctcgagactctgcaaagcattagctgctgcttctgcattgctccgcgctcttgtgaaatactggttctgttttctttattccttttgcactctcggttcccacctttgtgttggagtttaccatgttaccctgtaattaaaaacaaagaataggtaacatattgtgccagtgttgcaacgttttaaactgctaacagaccttaaaatatccccctacctgggtcctcagtgctatgtttaaagtgctgcagggatggagtggcgttttcttattgctgtatgtattgtacatagtggagtagttagttacctgataacagtcttgttatttgggtctcttagaccttacctctcaactccctcaagagtaccagtctctgaagttataatgctttggtctctacattaggggcaagatccagtctgagagaagtctcctttgagaagggccaagaggctctttcctgagtgtttgctttcggtttgttggtatgcctgtattgctgggctgtgctgctgctcgaagcagatggttttgactgtctttttgctctttcctatataatgaatagatgagtgaaaggagttttctttttctctttagtacttacgtattgggattcctgtgtcttacagctctccctctccaaataatacacagaatcctgcaactttttgcacagctggtatctgtctggtagcagtgagaccccttgtcttggtgatccttactgggtttccaagcagaggagtcacatgattacaattgccagtagagttgttgtttggggtacaagatgagaagaaagaaaaacctacagcctttctacattctgacatgctaacagtggtttaagtttctaaagtgtttaccagatgctgaaggcaaggggagggagcagaagcacttatgtttacggatattttaaactctgttagagagcagcctttgaaaatccccaatttggttctgctttttgacctctctctaccttttcagggtaatctttgtggcacaaacgatagcatttccaagctttagagttttctgaattcctgcgccttcctgacgtgagccctgagcgatcttctatgcagttctgccatgcgtcctgttggtctctctgtgttctttgttacttgggtgcaatagcaacttccctaccccgtgcattccatctttcatgttgtgtaaagttcttcacttttttctctgagggctgggggttgggggagtcagcatgattatattttaatgtagaaaatgtgacatctggatataaaatgaaaataaatgttaaattaaatggaccttaaaaaaaaaaaa

SEQ ID NO: 84 - DNA, 5667 bp, Human
cgcgcgccgcggtcagctgactgctgggctggcacgtgacttgttctgtgttcgcttgggtagaggaagccgtgaggccggagcttaggtcgggaagggatggatcgctgagccgatagcgtccgctaggctgtctgcctcggtacctgttactgctgctacttcctcgtttgacaccttcctggaatctctcttgatttttgaggaaatacctagtaacaaacatgactgagttctggcttatatctgctcctggggagaatcttgctgtcacttccaagttcaatattcctgacttaaaggttggcacgttggatgtcttggttggcttgtcagatgaactggctaaactggatgcatttgtagaaggagtggttaagaaagtagctcaatacatggctgatgtattggaagatagcaaagacaaagttcaagagaatctgttggctaatggagtggacttggttacttatataacaaggttccagtgggacatggccaaatatccaatcaagcagtccctgaaaaatatttctgaaataattgccaagggagtaactcagattgataatgacctgaaatctcgagcatctgcatacaataacctgaaaggaaatcttcagaatttggaacgaaagaatgcaggaagtttgctaactagaagtctagcagaaattgtgaagaaggatgactttgttcttgattcagagtatctcgtcacattactggtagtagttcccaagttaaaccacaacgactggattaagcagtatgaaacactagccgaaatggtagttccaaggtctagcaatgttctttcagaggaccaagacagttacctgtgtaatgtcaccttgtttaggaaggcagttgatgacttcagacacaaagccagagaaaacaaattcattgttcgtgacttccagtataatgaagaggagatgaaagcagataaagaagaaatgaacaggctttctactgataagaaaaaacaatttggaccacttgtacggtggctgaaagtgaattttagtgaagcatttattgcatggattcacgtgaaagcattacgggttttcgttgagtctgttttaaggtatggcttgccagtgaacttccaagcaatgctacttcagcccaataagaaaactttgaagaaactgagagaagtattacatgaattgtataaacatctagacagcagtgcagcagctattattgatgctcctatggatattccaggtttaaacctgagtcaacaagaatactacccctatgtgtactacaagattgattgcaacttgctggaattcaagtgaaaatgggctcctcccccgacaatcctgtccttgtgtttgtgtgtgctaacagaaataagttgcagtatggtcgtacttttaactctagtatcctttgcttgcttcttacgccctttcctaggtgaattctcccacagtggtctgtatctcaacattttctttttaaaggaaaaaatatatatatatagtttctttttattgatcaggtctgtaaatgtgtactaaaaaaatcagagtttatttataaacaaaatagtttatttaaagagaaggtctcttccttattgatatcatggtatgcattaattccatttgttactattgtgcacaaaagccctgttcacaggggaatggtgtaaacatttatactgttttgttcactgtatttagtagacataactgttgaatagttactgaatcatgatgtaaagaatatgtgaccatcttcaggtatgggatttctgaacgtttcaaatttcaatcaatgagcactgtcaacacccacaggagagaataaaattacctgtgcaaaggtgtattgtggtgtgtgtaacttaagattacagttctgtttgagagttaaatgatgtcatagctcacttgctatgctgcttccaggattttgttatatgctgaggtgtaaccatttgtgttgtctgactttcgtatgatttaattgagccaaatttgggtcagaacacaaatttgaagatgacttttcagtatatgatgggtatttacatttgaacactagaattttaggtctctcaaataattaagaatagagccagttttgaataaagtctagcagaactatgcagctttagtcatttgttttgtctaagtctgtattttatgtgttgtcttcttaagatctataattttggcatttatgtcatttgtgacatagtctgaaaatagagacattgttggcctttaaaatctcagaaatgaatgacttaatttagtgtcctgaaagagcttttaaaagaggattttgtggcaatgtttctcttactacgtactcacaggtttgcaaatgggaaaaaagtttacatttcagtttaggggcatatctaagctatgctattccctttagaaaattagcctccaaaatcttttgtttcaaaatattatattatttcataaataatttcaagcaaatacagacatccacaatgtagaacatgagagaccccctccctcaatttccacctcccaagggaagtttatgtatttttctaggcccttttctatgtctttacatctctgtctcacacacacacacgtatacacacacacagtttatttttaataaaataggattataccacacacatcctgtcacttgcttttttgcttaagagtatatctaagagaatcctttgtgtcagtgaagctggagctacctcattcttttaactggctgcgtggcgttccattgagtgtctgtcatcatgtgtttagccgagtggatggatagtctgcttgtttttagtttttgctcttaacaaacactgctgcagtcagcatccttgcacagatttctttgtatacttgtattagtatttctgtaagatctgagaagtggaatttgtagggtcataggttatgtacacttaagtttttgacactcactgccaagtcatctgtcagaattctaaactaaagacatgtttggagtgtggatttatcttcagtttttctttggacaagaggaagctgtgaaagattttgctatcagaaaattttggttctttgtcttttgcacatgttctttgagtcttagtatctgtaacgtggcgctactctctctatcatgggggggcatgttttgacattaaattgacttttaagaaaaacatgtcactaacctgaagctcagccacacagtgacttttaaggttttatttagactttactgttgttctcatgagagtaggtacagactgcataaggtttagaatcccagcatatgtctgaaacgacgggactttcactgtgatttccaccagagaaattatagcagagtggctgagcatgtgctctgaggccaggccccagctctgctgctgacgagctgtgtggtcctgggcagagtggtctccgagttccagtccctcctctgtaaaatgggcatgattagagtgcccaccgcattagggatgttggggtgagtcagtgtgaccccacgtgcacagaaagtgctgcgagtggtgcatggtgagaggttgatgcaggtacttagcccttggggaacacaggtagttccttttcactgtgtttaatttgggaaaatccagatccacatcattgtagagtctgagggttagaaggaagtcattgtgtctaacataacaacagagcagtttgtgtcactgagctccagtctgtgctggattattgatattgttggtggcggtcaccattcctggaaagggactgtcccaagccacttaccttcccgaggagtctgctggttctccttgaggatagtgcttagataacagactcattaaacatttactgagtgtctgtcagggatcattcacatccacatcatcctcccggcccctccccgtgttgttcatggagggagtactggcggtccccattttcatgtatggagacttcaggtgaaagaagttaagtgaattctttgttgagtcacaaatcttgagccagtcagaatttgaacctaagatttttgactgctggttgtcacacttcccgccccacactcaactgttgtgtgaatgagccagacacattgcttaacctgagtccgagatggacaatggtataggaaagatattcggtatggagaatcagatgttaacttgtgttgctatttttgttttgttttgttttgttttgtttttgagacaaggtcttgctctgtcacccaggctagagtgcagtggcatgatcagggcttactgcagcctcaccctcgatttcctgggctcaagcaatcctcccacctcagcccccaagtagctgggcctacaggtgcgtgctaccacgcctggccaattttttaaattttagcacagatgaggtctcactatgttgcccgggctggtctcgaactcctgagctcaagggatcctcccgcctcagcctcccaaagtgctggtgttacaggcataagccaccacgcctggcctgtgttgctattatatttggcaggaacccagagtccagaacatttcatctatgatgggttagataatgtgtctagttgtttgcatgccaatttcagtagcctcagttattcaacctaggagatttttctacctctttactaccctgctgaagttgctcttcagcagaaaatctttgtggaacacattccacactttgaaatcttcgtggaacaaaagatatttgtggaaccaatctttgtggaacatattccagctttttgaatgagtgcatatccagtagtacctttaaagtaacactttgtacataacaaatactcagcaaatgtgaaactttatttgctcttacttcaaaattagtccaaaatgttggaaataaaatataagacattgatctagatatgaggtttttctccttcattctcagctgtcgaagaaatcaaagtagcatatgcacaaggttaaaaaccacatatacaaatactatagaacagcttataatgaaaaccttgcctgcctttataaaaaatgtgattatcttcttctgttaatgtcaataaaagatggtttgtcctagaaggtctataaatggtattatgttctggaggaaacctagcaaaaactttgctagtttagtacttgtctctaaattgatgttcacccatttcaatattgcacttattaatggtctttatttttctagcatagataacaattgattctttagattcatatatggaggtaattcttgctttctaaagaaaggaatatggcacattggaaccattttattcaccagtggatttacccttagagtatttttagatctgagctgatgacttgtgagagaaaaagggaacagagtaaagccatggaagccatgaacagtaagagactgccgcctggcatggtttcttcttctgcagaagatgaaactgaggagaaacaagacaacatccttcataccaggaatggtcaagataatgcaagaagaaaaaagctttcaaacaaatcagaaggcagtcaacaaacagaaagggggacattccttccctggcagttactcaaaactgaaattgcttattgtgtacaccggggcttgtacttggggaatttaataaaaatgctcattaccaagctccaaaaaaaaaaaaaaaaaaaaaaaaaaaaaaaaaaaaaaa

SEQ ID NO: 85 - DNA, 1406 bp, Human
ctcttcccattggctgagaagggtcatgaggatgaactgtgcagtcacctggcaggaaccggaacccgcggttataaagtaaaggaacccgagatctgcgcaggggttccctttgccgatttctctcacctcacctttcaaacctaaactcgagcctactgttcaccggcctagcattgctctcgccatggctctcagcgatgctgacgtgcaaaagcagataaagcatatgatggctttcattgaacaagaagccaatgagaaagcagaagaaatagatgcaaaggcagaagaagagttcaacatagagaaaggtcggcttgtgcaaacccaaagactaaagattatggaatattatgagaagaaagagaaacagattgagcagcagaagaaaattcagatgtccaatttgatgaatcaagcgagactcaaagtcctcagagcaagagatgaccttatcacagacctactaaatgaagcaaaacagagactcagcaaggtggtaaaagatacaaccaggtaccaagtgctgctggatggactggttctccagggtttgtaccagttgctggagccccgaatgattgttcgttgcaggaaacaagatttccctctggtaaaggctgcagtgcagaaggcaattcctatgtacaaaattgccaccaaaaacgatgttgatgtccaaattgaccaggagtcctacctgcctgaagacatagctggtggagttgagatctataatggagatcgtaaaataaaggtttccaacaccctggaaagccggctggatctcatagcccagcagatgatgccagaagtccggggagccttgtttggtgcaaatgccaacaggaagtttttggactaagccttcaggaggtggagctcgtcgtcagctctcctgctgtgatgtggaagcttctgatatttgaagaaacacgaatgtctctgtagcttcctcttcactgccccagtattgctctgtatttatcagcgatgcccctctgtcactcatgccttgcctaattgttcacaatggtggaaagcttcatgtaatatgatcaggacccacctccagttcttctgaaagtgtgacagtgtccagccggttctgcagcactaggggagggggcagatggtggttgcatgggcttcctgggtctccactctccgtctggcctaaaggtgatgtatttggtgtttggccctgcagtccccactcttgaggcttaaggcgcatgtggcacaccactccttccagcagtagtcgctttactgttacctgtttaggcctagaagttttccctcatctgtaaatgtgatttaaaatctaagccatgaatatgctttatttattaaaagagttatgcggatttaatgtgatttctagtgtaaggcactacaaa

SEQ ID NO: 86 - DNA, 691 bp, Human
ggcggaggcggggtttcagtggcttctggtgctctagggtgagctctgcccggctgcagggatggcggggaggggtaagctcatcgcagtgatcggagacgaggacacggtgactggtttcctgctgggcggcataggggagcttaacaagaaccgccatcccaatttcctggtggtggagaaggatacaaccatcaatgagatcgaagacactttccggcaatttctaaaccgggatgacattggcatcatcctcatcaaccagtacatcgcagagatggtgcggcatgccctggacgcccaccagcagtccatccccgctgtcctggagatcccctccaaggagcacccatatgacgccgccaaggactccatcctgcgcagggccaggggcatgttcactgccgaagacctgcgctaggggactcctcatagccctcagcccttccctcgtttccaggcctctccccaggcttgccatcagccttctttactttttgagcctctgatttccaattccctgctccttcccactccattaagaggctaggtgaggcgcttctaggttgctggggctctgctggttaaggaacaggaagcctgaccatctccctccactacctcttccctgtgctgttacacagtgtcattgttgatgttaaattaaagtcatattcttgcttctctccag

SEQ ID NO: 87 - DNA, 8122 bp, Human
agctactgtgacttctccgattgtgtgagctttgttggagcctgcgtacgtggatttatcgctgccacggtctgcgtagctccagaggtttaaccataggatagagaaaccaggaatgtaatgaggaaatcaaaatggatccaagtatgggtgtgaattctgttaccatttctgttgagggtatgacttgcaattcctgtgtttggaccattgagcagcagattggaaaagtgaatggtgtgcatcacattaaggtatcactggaagaaaaaaatgcaactattatttatgaccctaaactacagactccaaagaccctacaggaagctattgatgacatgggctttgatgctgttatccataatcctgaccctctccctgttttaactgacaccttgtttctgactgttacggcgtcactgactttgccatgggaccatatccaaagcacattgctgaagaccaagggtgtgacagacattaaaatttaccctcagaaaagaactgtagcagtgacaataatcccttctatagtgaatgccaatcagataaaagagctggttccagaactcagtttagatactgggacactggagaaaaagtcaggagcttgtgaagatcatagtatggctcaagctggtgaagtcgtgctgaagatgaaagtggaagggatgacctgccattcatgtactagcactattgaaggaaaaattgggaaactgcaaggtgttcagcgaattaaagtctccctggacaatcaagaagctactattgtttatcaacctcatcttatctcagtagaggaaatgaaaaagcagattgaagctatgggctttccagcatttgtcaaaaagcagcccaagtacctcaaattgggagctattgatgtagaacgtctaaagaacacaccagttaaatcctcagaagggtcacagcaaaggagtccatcatataccaatgattcaacagccactttcatcattgatggcatgcattgtaaatcatgtgtgtcaaatattgaaagtactttatctgcactccaatatgtaagcagcatagtagtttctttagagaataggtctgccattgtgaagtataatgcaagctcagtcactccagaatccctgagaaaagcaatagaggctgtatcaccggggctatatagagttagtatcacaagtgaagttgagagtacctcaaactctccctccagctcatctcttcagaagattcctttgaatgtagttagccagcctctgacacaagaaactgtgataaacattgatggcatgacttgtaattcctgtgtgcagtctattgagggtgtcatatcaaaaaagccaggtgtaaaatccatacgagtctcccttgcaaatagcaatgggactgttgagtatgatcctctactaacctctccagaaacgttgagaggagcaatagaagacatgggatttgatgctaccttgtcagacacgaatgagccgttggtagtaatagctcagccttcatcggaaatgccgcttttgacttcaactaatgaattttatactaaagggatgacaccagttcaagacaaggaggaaggaaagaattcatctaagtgttacatacaggtcactggcatgacttgcgcttcctgtgtagcaaacattgaacggaatttaaggcgggaagaaggaatatattctatacttgtggccctgatggctggcaaggcagaagtaaggtataatcctgctgttatacaacccccaatgatagcagagttcatccgagaacttggatttggagccactgtgatagaaaatgctgatgaaggagatggtgttttggaacttgttgtgaggggaatgacgtgtgcctcctgcgtacataaaatagagtctagtctcacaaaacacagagggatcctatactgctccgtggccctggcaaccaacaaagcacatattaaatatgacccagaaattattggtcctagagatattatccatacaattgaaagcttaggttttgaagcttctttggtcaagaaggatcggtcagcaagtcacttagatcataaacgagaaataagacaatggagacggtcttttcttgtgagtctgtttttctgtattcctgtaatggggctgatgatatatatgatggttatggaccaccactttgcaactcttcaccataatcaaaacatgagtaaagaagaaatgatcaaccttcattcttctatgttcctggagcgccagattcttccaggattgtctgttatgaatttgctgtcctttttattgtgtgtacctgtacagtttttcggaggctggtacttctacattcaggcttataaagcactgaagcataagacagcaaatatggacgtactgattgtgctggcaaccaccattgcatttgcctactctttgattattcttctagttgcaatgtatgagagagccaaagtgaaccctattactttctttgacacaccccctatgctgtttgtgtttattgcactaggccgatggctggaacatatagcaaagggcaaaacatcagaggctcttgcaaagttaatttcactacaagctacagaagcaactattgtaactcttgattctgataatatcctcctcagtgaagaacaagtggatgtggaacttgtacaacgtggagatatcattaaagtagttccaggaggcaaatttccagtggatggtcgtgttattgaaggacattctatggtagatgagtccctcatcacaggggaggcaatgcctgtggctaagaaacctggcagcacagtgattgctggttccattaaccagaacgggtcactgcttatctgcgcaacacatgttggagcagacacaaccctttctcaaattgtcaaacttgtggaagaggcacaaacatcaaaggctcctatccagcagtttgcagacaaactcagtggctattttgttccttttattgtttttgtttccattgccaccctcttggtatggattgtaattggatttctgaattttgaaattgtggaaacctactttcctggctacaatagaagtatctcccgaacagaaacgataatacgatttgctttccaagcctctatcacagttctgtgtattgcatgtccctgttcactgggactggccactccaactgctgtgatggtgggtacaggagtaggtgctcaaaatggcatactaataaaaggtggagagccattggagatggctcataaggtaaaggtagtggtatttgataagactggaaccattactcacggaaccccagtggtgaatcaagtaaaggttctaactgaaagtaacagaatatcacaccataaaatcttggccattgtgggaactgctgaaagtaacagtgaacaccctctaggaacagccataaccaaatattgcaaacaggagctggacactgaaaccttgggtacctgcatagatttccaggttgtgccaggctgtggtattagctgtaaagtcaccaatattgaaggcttgctacataagaataactggaatatagaggacaataatattaaaaatgcatccctggttcaaattgatgccagtaatgaacagtcatcaacttcgtcttccatgattattgatgcccagatctcaaatgctcttaatgctcagcagtataaagtcctcattggtaaccgggagtggatgattagaaatggtcttgtcattaataacgatgtaaatgatttcatgactgaacatgagagaaaaggtcggactgctgtattagtagcagttgatgatgagctgtgtggcttgatagccattgcagacacagtgaagcctgaagcagaactggctatccatattctgaaatctatgggcttagaagtagttctgatgactggagacaacagtaaaacagctagatctattgcttctcaggttggcattactaaggtgtttgctgaagttctaccttctcacaaggttgctaaagtgaagcaacttcaagaggaggggaaacgggtagcaatggtgggagatggaatcaatgactccccagctctggcaatggctaatgtgggaattgctattggcacaggcacagatgtagccattgaagcagctgatgtggttttgataaggaatgatcttctggatgtagtggcaagtattgacttatcaagagagacagtcaagaggattcggataaattttgtctttgctctaatttataatctggttggaattcccatagctgctggagtttttatgcccattggtttggttttgcagccctggatgggatctgcagcaatggctgcttcatctgtttctgtagtactttcttctctcttccttaaactttacaggaaaccaacttacgagagttatgaactgcctgcccggagccagataggacagaagagtccttcagaaatcagcgttcatgttggaatagatgatacctcaaggaattctcctaaactgggtttgctggaccggattgttaattatagcagagcctctataaactcactactgtctgataaacgctccctaaacagtgttgttaccagtgaacctgacaagcactcactcctggtgggagacttcagggaagatgatgacactgcattataaaaggccatggagagtgctgccagtttaacttgtcatgcactgacacagcattcatgatgttaccttcacttttcaaaatattgtagaaggatttttctcatgctcttatattagggattctatttgagttgcgtttatctgttggcaaaaatatctttttcaaggcatcagctctgaacctagctttatttaaactgaatttccagtatatttttgttttcactaacaacagataaggtagagcagtgaggtttacaacaagccctacaattagagattgctgaactgctgctaaagtgattttttttttatttgaccaaaaaaaaaaaggcccaagaagaagaaaatgaaaaatttgaagatttgagagcatgaagatattcatgcttttgaactcaaaatattgaagatactctcaagcctgtatccctgccccactggggagcaatgactttcaaagcactgtgtataaaacatctagttttagaagggaaacagttgaaactgtttaaaaatagatgtgccttatttattgcaggctttctttcccccattctccctgcatccttgtccttgcaggtgcttttttagatgctccaatatgtcttcttttgttattttctttcgagctaaccaagtttaggtggtttttcattgattaaaaataactgacaactgttctaatattttgctcctttttaaattttgtagctcaaaagaccttaaaggtctgtagggttccctgcctcccatctttccactgttgtaaaaagtatatcaaattattccttcaagtttcctagctctgtgctcagtttcagttcactcctgccaagttggactctaagttattcttcatgtagtctgctgatctcagtctggaaacttaacattatgagccttttctgctcaaaaaattttcaaagattaaaactattatacatatacaggtcatataaaattacctggattcactaaatttgtttgttgttgttgttgttgttgttgttgttgttgagacagagtcttgttttgcagcccaggctggagtgcagtggcaccatcttggctcactgcaacctctgcctaccggattcaaggaattctccctgcctcagcctcctgagtagctaggattacaggtgcctgccaccacacccggctaattttcatatttttcagtagagacggggtttcgccatgttggctagcctggtcttaaactcctaacctcaggtgatccacccgccttggcctcccaaagtgctgggattacaggtgtgagcctccatgcccagcctaaatttgtattttttgaattgagtataatcactttgctagtatatataatttaatagattttatttatcttttagtgtttcagataacctctcaaaaagactttaaaataatgctattacacaaagctgcatttaccaaaaaatacagtaaaatcataatacagaaactaaaatttccctaggttatgacgctttttagctaaatatatactcttctctagtttaaaacatttgaacttgcctagttagtgtggttggcaaatttaggagcttgttcccattgccaaatggatttagaaattcccttgtgagtgcctggtagctaatacactggtcagagatctggtacttgtaagactatttaaatttctttgttagttgcaagatggatttcatatgcagaatatgtaaatgaagaggactcataagtaaattcctaacattttgttcccattaccagaagcaaagctgctgctaacccaacatctggcacataggatttgtactcggtaaatgttagttcttttctccccttgaggtcagtaataaatacaaaaaaatcatttttctagagcagagtcttaaaatcaggtgggggtaggggatggagttcttcctttcctaccccttttctcttttatcctttcatatatacacatgcaaagtttacaaccttattccatgctgtctttcagatttagaaaagatctaatttctgtctcagctgtcttaaagagagaactgaagcttttgatgaaggtgctattaatctagaaaggcaaacccatttcactgaaatatcaatgggtttgcatatctaggccctttttttagaccaatgcctatgccatcctccatgctttcagtttgagttttattatttattattttaattccagtggcccatcttataatacaacttgtttcttctagaagacagagctgatagggtaaatgttgaaaaaagaagcatgcctccttctccctcccacccacctcaagcagttgaacacagccagttattcttccattattatgtgtaccttggagtcatcctcttggtcttgtattcatattgtgggacagtgggaatagcagcttgtagtattgaaataatcaaagagataatttcagctcttacaacaagaacagaaaacatgctaattagaaaaagtcctgctttaagtaatatgtagccacatttgaatcctctaccacaagtcttttttgcaatcttgaactttcattagcttcaaagagaagctgtatttacaggagaaagaggtgattatggagggaatcaaaaatactgctttcagttagtagctagctttaagtcaggagttagtaatgagaaattttataaatgtgtatttctgtgtattcacatacatatatatatacacacatatatatgtacatacacatacatacatattaccatactgaagggaaatggatttatatttgaatttgatatttgaatatttgaagttctctatttatatttcatttatcactcttctgtattcactcagcaaccatgcccttagtctgaagataacaaggatactttaatatccagtgccggttcagactcacctatgtggcaccttaaacttaaatatccaaagatgccttttgaatttcaaagattaaaacacagctagagtagtagtattgtagtctcaagatgtatggtgtgtcatttgtgaaaatagaaacgttatttttcctagtttagtatcaacattttagaatgtcaaatttgatgccttgtgaacaagtaattttatattgtgctttaattttttaaaaagtattctttattcatatgtatagaatgcttaaaatagcactgtagacaagatgtttccaaaactttaagtgcgcatatcttttctgtatacagcttaaaatcaaaaatgtatgttaagagaattttttctattacttatggatcatgctttaaaatgatttttcttgatatttattttactccattttgtttttttctctgggtgaggcatctggttactggttattttaaaaagaataaagacattcctggaatcactccttttgggtttttgtttgttttgtttcttttctacatttttaagtattattttacaaaatagaaaaaatatagattcatgccaaattattacctatttttacact

SEQ ID NO: 88 - DNA, 6644 bp, Human
ttcccggacccctgtttgctttagagccgagccgcgccgatgccctcacactctgcgcctcctctcccgggactttaacaccccgctctcctccaccgaccaggtgaccttttgctctgagccagatcagagaagaattcggtgtccgtgcgggacgatgcctgagcaggagagacagatcacagccagagaaggggccagtcggaaaatcttatctaagctttctttgcctacccgtgcctgggaaccagcaatgaagaagagttttgcttttgacaatgttggctatgaaggtggtctggatggcctgggcccttcttctcaggtggccaccagcacagtcaggatcttgggcatgacttgccagtcatgtgtgaagtccattgaggacaggatttccaatttgaaaggcatcatcagcatgaaggtttccctggaacaaggcagtgccactgtgaaatatgtgccatcggttgtgtgcctgcaacaggtttgccatcaaattggggacatgggcttcgaggccagcattgcagaaggaaaggcagcctcctggccctcaaggtccttgcctgcccaggaggctgtggtcaagctccgggtggagggcatgacctgccagtcctgtgtcagctccattgaaggcaaggtccggaaactgcaaggagtagtgagagtcaaagtctcactcagcaaccaagaggccgtcatcacttatcagccttatctcattcagcccgaagacctcagggaccatgtaaatgacatgggatttgaagctgccatcaagagcaaagtggctcccttaagcctgggaccaattgatattgagcggttacaaagcactaacccaaagagacctttatcttctgctaaccagaattttaataattctgagaccttggggcaccaaggaagccatgtggtcaccctccaactgagaatagatggaatgcattgtaagtcttgcgtcttgaatattgaagaaaatattggccagctcctaggggttcaaagtattcaagtgtccttggagaacaaaactgcccaagtaaagtatgacccttcttgtaccagcccagtggctctgcagagggctatcgaggcacttccacctgggaattttaaagtttctcttcctgatggagccgaagggagtgggacagatcacaggtcttccagttctcattcccctggctccccaccgagaaaccaggtccagggcacatgcagtaccactctgattgccattgccggcatgacctgtgcatcctgtgtccattccattgaaggcatgatctcccaactggaaggggtgcagcaaatatcggtgtctttggccgaagggactgcaacagttctttataatccctctgtaattagcccagaagaactcagagctgctatagaagacatgggatttgaggcttcagtcgtttctgaaagctgttctactaaccctcttggaaaccacagtgctgggaattccatggtgcaaactacagatggtacacctacatctgtgcaggaagtggctccccacactgggaggctccctgcaaaccatgccccggacatcttggcaaagtccccacaatcaaccagagcagtggcaccgcagaagtgcttcttacagatcaaaggcatgacctgtgcatcctgtgtgtctaacatagaaaggaatctgcagaaagaagctggtgttctctccgtgttggttgccttgatggcaggaaaggcagagatcaagtatgacccagaggtcatccagcccctcgagatagctcagttcatccaggacctgggttttgaggcagcagtcatggaggactacgcaggctccgatggcaacattgagctgacaatcacagggatgacctgcgcgtcctgtgtccacaacatagagtccaaactcacgaggacaaatggcatcacttatgcctccgttgcccttgccaccagcaaagcccttgttaagtttgacccggaaattatcggtccacgggatattatcaaaattattgaggaaattggctttcatgcttccctggcccagagaaaccccaacgctcatcacttggaccacaagatggaaataaagcagtggaagaagtctttcctgtgcagcctggtgtttggcatccctgtcatggccttaatgatctatatgctgatacccagcaacgagccccaccagtccatggtcctggaccacaacatcattccaggactgtccattctaaatctcatcttctttatcttgtgtacctttgtccagctcctcggtgggtggtacttctacgttcaggcctacaaatctctgagacacaggtcagccaacatggacgtgctcatcgtcctggccacaagcattgcttatgtttattctctggtcatcctggtggttgctgtggctgagaaggcggagaggagccctgtgacattcttcgacacgccccccatgctctttgtgttcattgccctgggccggtggctggaacacttggcaaagagcaaaacctcagaagccctggctaaactcatgtctctccaagccacagaagccaccgttgtgacccttggtgaggacaatttaatcatcagggaggagcaagtccccatggagctggtgcagcggggcgatatcgtcaaggtggtccctgggggaaagtttccagtggatgggaaagtcctggaaggcaataccatggctgatgagtccctcatcacaggagaagccatgccagtcactaagaaacccggaagcactgtaattgcggggtctataaatgcacatggctctgtgctcattaaagctacccacgtgggcaatgacaccactttggctcagattgtgaaactggtggaagaggctcagatgtcaaaggcacccattcagcagctggctgaccggtttagtggatattttgtcccatttatcatcatcatgtcaactttgacgttggtggtatggattgtaatcggttttatcgattttggtgttgttcagagatactttcctaaccccaacaagcacatctcccagacagaggtgatcatccggtttgctttccagacgtccatcacggtgctgtgcattgcctgcccctgctccctggggctggccacgcccacggctgtcatggtgggcaccggggtggccgcgcagaacggcatcctcatcaagggaggcaagcccctggagatggcgcacaagataaagactgtgatgtttgacaagactggcaccattacccatggcgtccccagggtcatgcgggtgctcctgctgggggatgtggccacactgcccctcaggaaggttctggctgtggtggggactgcggaggccagcagtgaacaccccttgggcgtggcagtcaccaaatactgtaaagaggaacttggaacagagaccttgggatactgcacggacttccaggcagtgccaggctgtggaattgggtgcaaagtcagcaacgtggaaggcatcctggcccacagtgagcgccctttgagtgcaccggccagtcacctgaatgaggctggcagccttcccgcagaaaaagatgcagtcccccagaccttctctgtgctgattggaaaccgtgagtggctgaggcgcaacggtttaaccatttctagcgatgtcagtgacgctatgacagaccacgagatgaaaggacagacagccatcctggtggctattgacggtgtgctctgtgggatgatcgcaatcgcagacgctgtcaagcaggaggctgccctggctgtgcacacgctgcagagcatgggtgtggacgtggttctgatcacgggggacaaccggaagacagccagagctattgccacccaggttggcatcaacaaagtctttgcagaggtgctgccttcgcacaaggtggccaaggtccaggagctccagaataaagggaagaaagtcgccatggtgggggatggggtcaatgactccccggccttggcccaggcagacatgggtgtggccattggcaccggcacggatgtggccatcgaggcagccgacgtcgtccttatcagaaatgatttgctggatgtggtggctagcattcacctttccaagaggactgtccgaaggatacgcatcaacctggtcctggcactgatttataacctggttgggatacccattgcagcaggtgtcttcatgcccatcggcattgtgctgcagccctggatgggctcagcggccatggcagcctcctctgtgtctgtggtgctctcatccctgcagctcaagtgctataagaagcctgacctggagaggtatgaggcacaggcgcatggccacatgaagcccctgacggcatcccaggtcagtgtgcacataggcatggatgacaggtggcgggactcccccagggccacaccatgggaccaggtcagctatgtcagccaggtgtcgctgtcctccctgacgtccgacaagccatctcggcacagcgctgcagcagacgatgatggggacaagtggtctctgctcctgaatggcagggatgaggagcagtacatctgatgacttcaggcaggcgggccggggcagggacttgcctccactcaccacaagctgagcaggacagccagcagcaggatgggctgagctagcctccagctttggggacttccgctccctggatatgtccagtcatcctgccctgcagcacgcggccttgtctgggtgcagctgggcttggcctggagaggacggccctgcctgcctcttggcctcacgggaccgtcagcatgggctttgtcttggactctagtccttggctggactgtagaaggtgagaggcgagtcaccctcctcacagacctctgcttggagtatttaggatgactgctgtgaaatggagaacagtttcatcaggaccaaaaaacctcactgggcctttccagagaactgcagacctcactgtcagggtctttctgatgacgcctgtctgtgtgcatcatgtttctgagaccacagtttacctcaggtgtgcctgttgctttcttcctgcatagtctgttcctttcttcgtacatagtctgttccttttctctcctgtgtgcttgtcagtggggacccctcgcaaccctgcctgtcacctgggagggtgggaccaatgtccttgtggtctttgctgctgctctcaggcgcttctccaatgctctggagtgtgcatttcagcttgaacctgcttcctggctcacacatccccagccagggagcttgccacactcttcttcaagttgaggagagttcttttttgcttaaagcccccttctccatggagtgttggcttctcaatagagtgttgttgctgaccagctggagtgagggcctcagagcctgacctgagagtccgtactcggcttcctgtggggtgtaggttctcgcgattcaggacgtccttccatatccctgcccagcctgtggtgcttgaaacgtttgccccatgggaaacgtatgtgtgcaggagcctccctgcacggcccaaggggcttcgttttcagtcttctgactgtcacctcgtggggttcagtagagaattcatgtgactagcgcctggccttgtgtggcttggaggaaatggtactgcccaaataggaggaaaacacagcctccctgagcctgcattctgcacgctgcccaggggcttcagaaaaggagtggccacagcaccccgaagggagcatctgtttacctggcagtggctctcagagcagcagaacgggttcagttttagactctgaagttggttgtgattgacagaaccctttgggagcaaactagtagagttggattaaattctgggtgaaacccttttctcccacacaaaatagttttagtgatttttttcattgtccattacttgccaggggcagttttagcagcacttttgatagattacgtctaatcctcccaaccaaccagcagggtagctattactgtccacattttacaggcaaggaaacaggctccaagaggctgaggactttgcccaggatgacatagccaatggacaagcagtgtctgtcagctgtgaaggcttcactcttattgtccttctaccttgaatagaagttttcctgataagaataaacgaggaaaaggtccttgcctcctggaagaacaaatctaccaggtgatctattcattgtttcaactcagaatgcacttgattcaggaggtcatctgaccttcaccttggatggttagtttcactttttacatatagtttttgcagggttttattttataaaatccaagcgcgctgttgattgtgttttccttgttttcagcccccccactccagcccgcagcacatttccgctgtccgtcagtaattgtgtcctctctttatgcttgcttggggaatgttgttttctgactaggctgatcattatctaaagaatctaattctgttgatttttaaaacttttaggaccataaacgttgtgttcatatatggacatggaaatatttatataattttatagaaaataaccttttagatggtcaaagtgtaaggagtttttttgtcagataatcatttctacttcaaaaacatttcatgcaatattagaataaagttcctgtcattcctctaaaaaaa

SEQ ID NO: 89 - DNA, 4872 bp, Human
tattcagatattctccagattcctaaagattagagatcatttctcattctcctaggagtactcacttcaggaagcaaccagataaaagagaggtgcaacggaagccagaacattcctcctggaaattcaacctgtttcgcagtttctcgaggaatcagcattcagtcaatccgggccgggagcagtcatctgtggtgaggctgattggctgggcaggaacagcgccggggcgtgggctgagcacagccgcttcgctctctttgccacaggaagcctgagctcattcgagtagcggctcttccaagctcaaagaagcagaggccgctgttcgtttcctttaggtctttccactaaagtcggagtatcttcttccaaaatttcacgtcttggtggccgttccaaggagcgcgaggtcggaatggatcttgaaggggaccgcaatggaggagcaaagaagaagaacttttttaaactgaacaataaaagtgaaaaagataagaaggaaaagaaaccaactgtcagtgtattttcaatgtttcgctattcaaattggcttgacaagttgtatatggtggtgggaactttggctgccatcatccatggggctggacttcctctcatgatgctggtgtttggagaaatgacagatatctttgcaaatgcaggaaatttagaagatctgatgtcaaacatcactaatagaagtgatatcaatgatacagggttcttcatgaatctggaggaagacatgaccaggtatgcctattattacagtggaattggtgctggggtgctggttgctgcttacattcaggtttcattttggtgcctggcagctggaagacaaatacacaaaattagaaaacagttttttcatgctataatgcgacaggagataggctggtttgatgtgcacgatgttggggagcttaacacccgacttacagatgatgtctccaagattaatgaaggaattggtgacaaaattggaatgttctttcagtcaatggcaacatttttcactgggtttatagtaggatttacacgtggttggaagctaacccttgtgattttggccatcagtcctgttcttggactgtcagctgctgtctgggcaaagatactatcttcatttactgataaagaactcttagcgtatgcaaaagctggagcagtagctgaagaggtcttggcagcaattagaactgtgattgcatttggaggacaaaagaaagaacttgaaaggtacaacaaaaatttagaagaagctaaaagaattgggataaagaaagctattacagccaatatttctataggtgctgctttcctgctgatctatgcatcttatgctctggccttctggtatgggaccaccttggtcctctcaggggaatattctattggacaagtactcactgtattcttttctgtattaattggggcttttagtgttggacaggcatctccaagcattgaagcatttgcaaatgcaagaggagcagcttatgaaatcttcaagataattgataataagccaagtattgacagctattcgaagagtgggcacaaaccagataatattaagggaaatttggaattcagaaatgttcacttcagttacccatctcgaaaagaagttaagatcttgaagggtctgaacctgaaggtgcagagtgggcagacggtggccctggttggaaacagtggctgtgggaagagcacaacagtccagctgatgcagaggctctatgaccccacagaggggatggtcagtgttgatggacaggatattaggaccataaatgtaaggtttctacgggaaatcattggtgtggtgagtcaggaacctgtattgtttgccaccacgatagctgaaaacattcgctatggccgtgaaaatgtcaccatggatgagattgagaaagctgtcaaggaagccaatgcctatgactttatcatgaaactgcctcataaatttgacaccctggttggagagagaggggcccagttgagtggtgggcagaagcagaggatcgccattgcacgtgccctggttcgcaaccccaagatcctcctgctggatgaggccacgtcagccttggacacagaaagcgaagcagtggttcaggtggctctggataaggccagaaaaggtcggaccaccattgtgatagctcatcgtttgtctacagttcgtaatgctgacgtcatcgctggtttcgatgatggagtcattgtggagaaaggaaatcatgatgaactcatgaaagagaaaggcatttacttcaaacttgtcacaatgcagacagcaggaaatgaagttgaattagaaaatgcagctgatgaatccaaaagtgaaattgatgccttggaaatgtcttcaaatgattcaagatccagtctaataagaaaaagatcaactcgtaggagtgtccgtggatcacaagcccaagacagaaagcttagtaccaaagaggctctggatgaaagtatacctccagtttccttttggaggattatgaagctaaatttaactgaatggccttattttgttgttggtgtattttgtgccattataaatggaggcctgcaaccagcatttgcaataatattttcaaagattataggggtttttacaagaattgatgatcctgaaacaaaacgacagaatagtaacttgttttcactattgtttctagcccttggaattatttcttttattacatttttccttcagggtttcacatttggcaaagctggagagatcctcaccaagcggctccgatacatggttttccgatccatgctcagacaggatgtgagttggtttgatgaccctaaaaacaccactggagcattgactaccaggctcgccaatgatgctgctcaagttaaaggggctataggttccaggcttgctgtaattacccagaatatagcaaatcttgggacaggaataattatatccttcatctatggttggcaactaacactgttactcttagcaattgtacccatcattgcaatagcaggagttgttgaaatgaaaatgttgtctggacaagcactgaaagataagaaagaactagaaggttctgggaagatcgctactgaagcaatagaaaacttccgaaccgttgtttctttgactcaggagcagaagtttgaacatatgtatgctcagagtttgcaggtaccatacagaaactctttgaggaaagcacacatctttggaattacattttccttcacccaggcaatgatgtatttttcctatgctggatgtttccggtttggagcctacttggtggcacataaactcatgagctttgaggatgttctgttagtattttcagctgttgtctttggtgccatggccgtggggcaagtcagttcatttgctcctgactatgccaaagccaaaatatcagcagcccacatcatcatgatcattgaaaaaacccctttgattgacagctacagcacggaaggcctaatgccgaacacattggaaggaaatgtcacatttggtgaagttgtattcaactatcccacccgaccggacatcccagtgcttcagggactgagcctggaggtgaagaagggccagacgctggctctggtgggcagcagtggctgtgggaagagcacagtggtccagctcctggagcggttctacgaccccttggcagggaaagtgctgcttgatggcaaagaaataaagcgactgaatgttcagtggctccgagcacacctgggcatcgtgtcccaggagcccatcctgtttgactgcagcattgctgagaacattgcctatggagacaacagccgggtggtgtcacaggaagagattgtgagggcagcaaaggaggccaacatacatgccttcatcgagtcactgcctaataaatatagcactaaagtaggagacaaaggaactcagctctctggtggccagaaacaacgcattgccatagctcgtgcccttgttagacagcctcatattttgcttttggatgaagccacgtcagctctggatacagaaagtgaaaaggttgtccaagaagccctggacaaagccagagaaggccgcacctgcattgtgattgctcaccgcctgtccaccatccagaatgcagacttaatagtggtgtttcagaatggcagagtcaaggagcatggcacgcatcagcagctgctggcacagaaaggcatctatttttcaatggtcagtgtccaggctggaacaaagcgccagtgaactctgactgtatgagatgttaaatactttttaatatttgtttagatatgacatttattcaaagttaaaagcaaacacttacagaattatgaagaggtatctgtttaacatttcctcagtcaagttcagagtcttcagagacttcgtaattaaaggaacagagtgagagacatcatcaagtggagagaaatcatagtttaaactgcattataaattttataacagaattaaagtagattttaaaagataaaatgtgtaattttgtttatattttcccatttggactgtaactgactgccttgctaaaagattatagaagtagcaaaaagtattgaaatgtttgcataaagtgtctataataaaactaaactttcatgtgactggagtcatcttgtccaaactgcctgtgaatatatcttctctcaattggaatattgtagataacttctgctttaaaaaagttttctttaaatatacctactcatttttgtgggaatggttaagcagtttaaataattcctgttgtatatgtctattcacattgggtcttacagaaccatctggcttcattcttcttggacttgatcctgctgattcttgcatttccacat

SEQ ID NO: 90 - DNA, 5871 bp, Human
ggacaggcgtggcggccggagccccagcatccctgcttgaggtccaggagcggagcccgcggccaccgccgcctgatcagcgcgaccccggcccgcgcccgccccgcccggcaagatgctgcccgtgtaccaggaggtgaagcccaacccgctgcaggacgcgaacatctgctcacgcgtgttcttctggtggctcaatcccttgtttaaaattggccataaacggagattagaggaagatgatatgtattcagtgctgccagaagaccgctcacagcaccttggagaggagttgcaagggttctgggataaagaagttttaagagctgagaatgacgcacagaagccttctttaacaagagcaatcataaagtgttactggaaatcttatttagttttgggaatttttacgttaattgaggaaagtgccaaagtaatccagcccatatttttgggaaaaattattaattattttgaaaattatgatcccatggattctgtggctttgaacacagcgtacgcctatgccacggtgctgactttttgcacgctcattttggctatactgcatcacttatatttttatcacgttcagtgtgctgggatgaggttacgagtagccatgtgccatatgatttatcggaaggcacttcgtcttagtaacatggccatggggaagacaaccacaggccagatagtcaatctgctgtccaatgatgtgaacaagtttgatcaggtgacagtgttcttacacttcctgtgggcaggaccactgcaggcgatcgcagtgactgccctactctggatggagataggaatatcgtgccttgctgggatggcagttctaatcattctcctgcccttgcaaagctgttttgggaagttgttctcatcactgaggagtaaaactgcaactttcacggatgccaggatcaggaccatgaatgaagttataactggtataaggataataaaaatgtacgcctgggaaaagtcattttcaaatcttattaccaatttgagaaagaaggagatttccaagattctgagaagttcctgcctcagggggatgaatttggcttcgtttttcagtgcaagcaaaatcatcgtgtttgtgaccttcaccacctacgtgctcctcggcagtgtgatcacagccagccgcgtgttcgtggcagtgacgctgtatggggctgtgcggctgacggttaccctcttcttcccctcagccattgagagggtgtcagaggcaatcgtcagcatccgaagaatccagacctttttgctacttgatgagatatcacagcgcaaccgtcagctgccgtcagatggtaaaaagatggtgcatgtgcaggattttactgctttttgggataaggcatcagagaccccaactctacaaggcctttcctttactgtcagacctggcgaattgttagctgtggtcggccccgtgggagcagggaagtcatcactgttaagtgccgtgctcggggaattggccccaagtcacgggctggtcagcgtgcatggaagaattgcctatgtgtctcagcagccctgggtgttctcgggaactctgaggagtaatattttatttgggaagaaatatgaaaaggaacgatatgaaaaagtcataaaggcttgtgctctgaaaaaggatttacagctgttggaggatggtgatctgactgtgataggagatcggggaaccacgctgagtggagggcagaaagcacgggtaaaccttgcaagagcagtgtatcaagatgctgacatctatctcctggacgatcctctcagtgcagtagatgcggaagttagcagacacttgttcgaactgtgtatttgtcaaattttgcatgagaagatcacaattttagtgactcatcagttgcagtacctcaaagctgcaagtcagattctgatattgaaagatggtaaaatggtgcagaaggggacttacactgagttcctaaaatctggtatagattttggctcccttttaaagaaggataatgaggaaagtgaacaacctccagttccaggaactcccacactaaggaatcgtaccttctcagagtcttcggtttggtctcaacaatcttctagaccctccttgaaagatggtgctctggagagccaagatacagagaatgtcccagttacactatcagaggagaaccgttctgaaggaaaagttggttttcaggcctataagaattacttcagagctggtgctcactggattgtcttcattttccttattctcctaaacactgcagctcaggttgcctatgtgcttcaagattggtggctttcatactgggcaaacaaacaaagtatgctaaatgtcactgtaaatggaggaggaaatgtaaccgagaagctagatcttaactggtacttaggaatttattcaggtttaactgtagctaccgttctttttggcatagcaagatctctattggtattctacgtccttgttaactcttcacaaactttgcacaacaaaatgtttgagtcaattctgaaagctccggtattattctttgatagaaatccaataggaagaattttaaatcgtttctccaaagacattggacacttggatgatttgctgccgctgacgtttttagatttcatccagacattgctacaagtggttggtgtggtctctgtggctgtggccgtgattccttggatcgcaatacccttggttccccttggaatcattttcatttttcttcggcgatattttttggaaacgtcaagagatgtgaagcgcctggaatctacaactcggagtccagtgttttcccacttgtcatcttctctccaggggctctggaccatccgggcatacaaagcagaagagaggtgtcaggaactgtttgatgcacaccaggatttacattcagaggcttggttcttgtttttgacaacgtcccgctggttcgccgtccgtctggatgccatctgtgccatgtttgtcatcatcgttgcctttgggtccctgattctggcaaaaactctggatgccgggcaggttggtttggcactgtcctatgccctcacgctcatggggatgtttcagtggtgtgttcgacaaagtgctgaagttgagaatatgatgatctcagtagaaagggtcattgaatacacagaccttgaaaaagaagcaccttgggaatatcagaaacgcccaccaccagcctggccccatgaaggagtgataatctttgacaatgtgaacttcatgtacagtccaggtgggcctctggtactgaagcatctgacagcactcattaaatcacaagaaaaggttggcattgtgggaagaaccggagctggaaaaagttccctcatctcagccctttttagattgtcagaacccgaaggtaaaatttggattgataagatcttgacaactgaaattggacttcacgatttaaggaagaaaatgtcaatcatacctcaggaacctgttttgttcactggaacaatgaggaaaaacctggatccctttaaggagcacacggatgaggaactgtggaatgccttacaagaggtacaacttaaagaaaccattgaagatcttcctggtaaaatggatactgaattagcagaatcaggatccaattttagtgttggacaaagacaactggtgtgccttgccagggcaattctcaggaaaaatcagatattgattattgatgaagcgacggcaaatgtggatccaagaactgatgagttaatacaaaaaaaaatccgggagaaatttgcccactgcaccgtgctaaccattgcacacagattgaacaccattattgacagcgacaagataatggttttagattcaggaagactgaaagaatatgatgagccgtatgttttgctgcaaaataaagagagcctattttacaagatggtgcaacaactgggcaaggcagaagccgctgccctcactgaaacagcaaaacaggtatacttcaaaagaaattatccacatattggtcacactgaccacatggttacaaacacttccaatggacagccctcgaccttaactattttcgagacagcactgtgaatccaaccaaaatgtcaagtccgttccgaaggcattttccactagtttttggactatgtaaaccacattgtacttttttttactttggcaacaaatatttatacatacaagatgctagttcatttgaatatttctcccaacttatccaaggatctccagctctaacaaaatggtttatttttatttaaatgtcaatagttgttttttaaaatccaaatcagaggtgcaggccaccagttaaatgccgtctatcaggttttgtgccttaagagactacagagtcaaagctcatttttaaaggagtaggacaaagttgtcacaggtttttgttgttgtttttattgcccccaaaattacatgttaatttccatttatatcagggattctatttacttgaagactgtgaagttgccattttgtctcattgttttctttgacataactaggatccattatttcccctgaaggcttcttgttagaaaatagtacagttacaaccaataggaacaacaaaaagaaaaagtttgtgacattgtagtagggagtgtgtaccccttactccccatcaaaaaaaaaaatggatacatggttaaaggatagaagggcaatattttatcatatgttctaaaagagaaggaagagaaaatactactttctcaaaatggaagcccttaaaggtgctttgatactgaaggacacaaatgtgaccgtccatcctcctttagagttgcatgacttggacacggtaactgttgcagttttagactcagcattgtgacacttcccaagaaggccaaacctctaaccgacattcctgaaatacgtggcattattcttttttggatttctcatttatggaaggctaaccctctgttgactgtaagccttttggtttgggctgtattgaaatcctttctaaattgcatgaataggctctgctaacgtgatgagacaaactgaaaattattgcaagcattgactataattatgcagtacgttctcaggatgcatccaggggttcattttcatgagcctgtccaggttagtttactcctgaccactaatagcattgtcatttgggctttctgttgaatgaatcaacaaaccacaatacttcctgggaccttttgtactttatttgaactatgagtctttaatttttcctgatgatggtggctgtaatatgttgagttcagtttactaaaggttttactattatggtttgaagtggagtctcatgacctctcagaataaggtgtcacctccctgaaattgcatatatgtatatagacatgcacacgtgtgcatttgtttgtatacatatatttgtccttcgtatagcaagttttttgctcatcagcagagagcaacagatgttttattgagtgaagccttaaaaagcacacaccacacacagctaactgccaaaatacattgaccgtagtagctgttcaactcctagtacttagaaatacacgtatggttaatgttcagtccaacaaaccacacacagtaaatgtttattaatagtcatggttcgtattttaggtgactgaaattgcatcagtgatcataatgaggtttgttaaaacgatagctatattcaaaatgtctatatgtttatttggacttttgaggttaaagacagtcatataaacgtcctgtttctgttttaatgttatcatagaattttttaatgaaactaaattcaattgaaataaatgatagttttcatctccaaaaaaaaaaaaaaaaaaaaaaaaaaaaaaaaaaaaaaa

SEQ ID NO: 91 - DNA, 5851 bp, Human
cttgcgcggtgtggcggccgatgccgctataaaggcttgttttgctgcagggctcatgctcgggagcgtggttgagcggctggcgcggttgtcctggagcaggggcgcaggaattctgatgtgaaactaacagtctgtgagccctggaacctccactcagagaagatgaaggatatcgacataggaaaagagtatatcatccccagtcctgggtatagaagtgtgagggagagaaccagcacttctgggacgcacagagaccgtgaagattccaagttcaggagaactcgaccgttggaatgccaagatgccttggaaacagcagcccgagccgagggcctctctcttgatgcctccatgcattctcagctcagaatcctggatgaggagcatcccaagggaaagtaccatcatggcttgagtgctctgaagcccatccggactacttccaaacaccagcacccagtggacaatgctgggcttttttcctgtatgactttttcgtggctttcttctctggcccgtgtggcccacaagaagggggagctctcaatggaagacgtgtggtctctgtccaagcacgagtcttctgacgtgaactgcagaagactagagagactgtggcaagaagagctgaatgaagttgggccagacgctgcttccctgcgaagggttgtgtggatcttctgccgcaccaggctcatcctgtccatcgtgtgcctgatgatcacgcagctggctggcttcagtggaccagccttcatggtgaaacacctcttggagtatacccaggcaacagagtctaacctgcagtacagcttgttgttagtgctgggcctcctcctgacggaaatcgtgcggtcttggtcgcttgcactgacttgggcattgaattaccgaaccggtgtccgcttgcggggggccatcctaaccatggcatttaagaagatccttaagttaaagaacattaaagagaaatccctgggtgagctcatcaacatttgctccaacgatgggcagagaatgtttgaggcagcagccgttggcagcctgctggctggaggacccgttgttgccatcttaggcatgatttataatgtaattattctgggaccaacaggcttcctgggatcagctgtttttatcctcttttacccagcaatgatgtttgcatcacggctcacagcatatttcaggagaaaatgcgtggccgccacggatgaacgtgtccagaagatgaatgaagttcttacttacattaaatttatcaaaatgtatgcctgggtcaaagcattttctcagagtgttcaaaaaatccgcgaggaggagcgtcggatattggaaaaagctgggtacttccagagcatcactgtgggtgtggctcccattgtggtggtgattgccagcgtggtgaccttctctgttcatatgaccctgggcttcgatctgacagcagcacaggctttcacagtggtgacagtcttcaattccatgacttttgctttgaaagtaacaccgttttcagtaaagtccctctcagaagcctcagtggctgttgacagatttaagagtttgtttctaatggaagaggttcacatgataaagaacaaaccagccagtcctcacatcaagatagagatgaaaaatgccaccttggcatgggactcctcccactccagtatccagaactcgcccaagctgacccccaaaatgaaaaaagacaagagggcttccaggggcaagaaagagaaggtgaggcagctgcagcgcactgagcatcaggcggtgctggcagagcagaaaggccacctcctcctggacagtgacgagcggcccagtcccgaagaggaagaaggcaagcacatccacctgggccacctgcgcttacagaggacactgcacagcatcgatctggagatccaagagggtaaactggttggaatctgtggcagtgtgggaagtggaaaaacctctctcatttcagccattttaggccagatgacgcttctagagggcagcattgcaatcagtggaaccttcgcttatgtggcccagcaggcctggatcctcaatgctactctgagagacaacatcctgtttgggaaggaatatgatgaagaaagatacaactctgtgctgaacagctgctgcctgaggcctgacctggccattcttcccagcagcgacctgacggagattggagagcgaggagccaacctgagcggtgggcagcgccagaggatcagccttgcccgggccttgtatagtgacaggagcatctacatcctggacgaccccctcagtgccttagatgcccatgtgggcaaccacatcttcaatagtgctatccggaaacatctcaagtccaagacagttctgtttgttacccaccagttacagtacctggttgactgtgatgaagtgatcttcatgaaagagggctgtattacggaaagaggcacccatgaggaactgatgaatttaaatggtgactatgctaccatttttaataacctgttgctgggagagacaccgccagttgagatcaattcaaaaaaggaaaccagtggttcacagaagaagtcacaagacaagggtcctaaaacaggatcagtaaagaaggaaaaagcagtaaagccagaggaagggcagcttgtgcagctggaagagaaagggcagggttcagtgccctggtcagtatatggtgtctacatccaggctgctgggggccccttggcattcctggttattatggcccttttcatgctgaatgtaggcagcaccgccttcagcacctggtggttgagttactggatcaagcaaggaagcgggaacaccactgtgactcgagggaacgagacctcggtgagtgacagcatgaaggacaatcctcatatgcagtactatgccagcatctacgccctctccatggcagtcatgctgatcctgaaagccattcgaggagttgtctttgtcaagggcacgctgcgagcttcctcccggctgcatgacgagcttttccgaaggatccttcgaagccctatgaagttttttgacacgacccccacagggaggattctcaacaggttttccaaagacatggatgaagttgacgtgcggctgccgttccaggccgagatgttcatccagaacgttatcctggtgttcttctgtgtgggaatgatcgcaggagtcttcccgtggttccttgtggcagtggggccccttgtcatcctcttttcagtcctgcacattgtctccagggtcctgattcgggagctgaagcgtctggacaatatcacgcagtcacctttcctctcccacatcacgtccagcatacagggccttgccaccatccacgcctacaataaagggcaggagtttctgcacagataccaggagctgctggatgacaaccaagctcctttttttttgtttacgtgtgcgatgcggtggctggctgtgcggctggacctcatcagcatcgccctcatcaccaccacggggctgatgatcgttcttatgcacgggcagattcccccagcctatgcgggtctcgccatctcttatgctgtccagttaacggggctgttccagtttacggtcagactggcatctgagacagaagctcgattcacctcggtggagaggatcaatcactacattaagactctgtccttggaagcacctgccagaattaagaacaaggctccctcccctgactggccccaggagggagaggtgacctttgagaacgcagagatgaggtaccgagaaaacctccctctcgtcctaaagaaagtatccttcacgatcaaacctaaagagaagattggcattgtggggcggacaggatcagggaagtcctcgctggggatggccctcttccgtctggtggagttatctggaggctgcatcaagattgatggagtgagaatcagtgatattggccttgccgacctccgaagcaaactctctatcattcctcaagagccggtgctgttcagtggcactgtcagatcaaatttggaccccttcaaccagtacactgaagaccagatttgggatgccctggagaggacacacatgaaagaatgtattgctcagctacctctgaaacttgaatctgaagtgatggagaatggggataacttctcagtgggggaacggcagctcttgtgcatagctagagccctgctccgccactgtaagattctgattttagatgaagccacagctgccatggacacagagacagacttattgattcaagagaccatccgagaagcatttgcagactgtaccatgctgaccattgcccatcgcctgcacacggttctaggctccgataggattatggtgctggcccagggacaggtggtggagtttgacaccccatcggtccttctgtccaacgacagttcccgattctatgccatgtttgctgctgcagagaacaaggtcgctgtcaagggctgactcctccctgttgacgaagtctcttttctttagagcattgccattccctgcctggggcgggcccctcatcgcgtcctcctaccgaaaccttgcctttctcgattttatctttcgcacagcagttccggattggcttgtgtgtttcacttttagggagagtcatattttgattattgtatttattccatattcatgtaaacaaaatttagtttttgttcttaattgcactctaaaaggttcagggaaccgttattataattgtatcagaggcctataatgaagctttatacgtgtagctatatctatatataattctgtacatagcctatatttacagtgaaaatgtaagctgtttattttatattaaaataagcactgtgctaataacagtgcatattcctttctatcatttttgtacagtttgctgtactagagatctggttttgctattagactgtaggaagagtagcatttcattcttctctagctggtggtttcacggtgccaggttttctgggtgtccaaaggaagacgtgtggcaatagtgggccctccgacagccccctctgccgcctccccacggccgctccaggggtggctggagacgggtgggcggctggagaccatgcagagcgccgtgagttctcagggctcctgccttctgtcctggtgtcacttactgtttctgtcaggagagcagcggggcgaagcccaggccccttttcactccctccatcaagaatggggatcacagagacattcctccgagccggggagtttctttcctgccttcttctttttgctgttgtttctaaacaagaatcagtctatccacagagagtcccactgcctcaggttcctatggctggccactgcacagagctctccagctccaagacctgttggttccaagccctggagccaactgctgctttttgaggtggcactttttcatttgcctattcccacacctccacagttcagtggcagggctcaggatttcgtgggtctgttttcctttctcaccgcagtcgtcgcacagtctctctctctctctcccctcaaagtctgcaactttaagcagctcttgctaatcagtgtctcacactggcgtagaagtttttgtactgtaaagagacctacctcaggttgctggttgctgtgtggtttggtgtgttcccgcaaaccccctttgtgctgtggggctggtagctcaggtgggcgtggtcactgctgtcatcaattgaatggtcagcgttgcatgtcgtgaccaactagacattctgtcgccttagcatgtttgctgaacaccttgtggaagcaaaaatctgaaaatgtgaataaaattattttggattttgtaaaaaaaaaa

SEQ ID NO: 92 - DNA, 1561 bp, Human
gggcttatcccgcctgtcccgccattctcgctagttcgatcggtagcgggagcggagagcggaccccagagagccctgagcagccccaccgccgccgccggcctagttaccatcacaccccgggaggagccgcagctgccgcagccggccccagtcaccatcaccgcaaccatgagcagcgaggccgagacccagcagccgcccgccgccccccccgccgcccccgccctcagcgccgccgacaccaagcccggcactacgggcagcggcgcagggagcggtggcccgggcggcctcacatcggcggcgcctgccggcggggacaagaaggtcatcgcaacgaaggttttgggaacagtaaaatggttcaatgtaaggaacggatatggtttcatcaacaggaatgacaccaaggaagatgtatttgtacaccagactgccataaagaagaataaccccaggaagtaccttcgcagtgtaggagatggagagactgtggagtttgatgttgttgaaggagaaaagggtgcggaggcagcaaatgttacaggtcctggtggtgttccagttcaaggcagtaaatatgcagcagaccgtaaccattatagacgctatccacgtcgtaggggtcctccacgcaattaccagcaaaattaccagaatagtgagagtggggaaaagaacgagggatcggagagtgctcccgaaggccaggcccaacaacgccggccctaccgcaggcgaaggttcccaccttactacatgcggagaccctatgggcgtcgaccacagtattccaaccctcctgtgcagggagaagtgatggagggtgctgacaaccagggtgcaggagaacaaggtagaccagtgaggcagaatatgtatcggggatatagaccacgattccgcaggggccctcctcgccaaagacagcctagagaggacggcaatgaagaagataaagaaaatcaaggagatgagacccaaggtcagcagccacctcaacgtcggtaccgccgcaacttcaattaccgacgcagacgcccagaaaaccctaaaccacaagatggcaaagagacaaaagcagccgatccaccagctgagaattcgtccgctcccgaggctgagcagggcggggctgagtaaatgccggcttaccatctctaccatcatccggtttagtcatccaacaagaagaaatatgaaattccagcaataagaaatgaacaaaagattggagctgaagacctaaagtgcttgctttttgcccgttgaccagataaatagaactatctgcattatctatgcagcatggggtttttattatttttacctaaagacgtctctttttggtaataacaaacgtgttttttaaaaaagcctggtttttctcaatacgcctttaaaggtttttaaattgtttcatatctggtcaagttgagatttttaagaacttcatttttaatttgtaataaaagtttacaacttgattttttcaaaaaagtcaacaaactgcaagcacctgttaataaaggtcttaaataataaaaaaaaaaaaaaa

SEQ ID NO: 93 - protein, 11 aa, Artificial Sequence
  Made in the lab
ACDARGDAFCG

SEQ ID NO: 94 - DNA, 25 bp, Artificial Sequence
  Made in the lab
ggtattattcagcacgacttgattt

SEQ ID NO: 95 - DNA, 25 bp, Artificial Sequence
  Made in the lab
gcaatcaatggatgaaagtggatta

SEQ ID NO: 96 - DNA, 25 bp, Artificial Sequence
  Made in the lab
ccatgaggaaatgagagaaatgctt

SEQ ID NO: 97 - DNA, 25 bp, Artificial Sequence
  Made in the lab
gccacatcatcaccatatagagata

SEQ ID NO: 98 - DNA, 25 bp, Artificial Sequence
  Made in the lab
ccacagtgcattgtatgtgtgaatt

SEQ ID NO: 99 - DNA, 25 bp, Artificial Sequence
  Made in the lab
ggaaacttctggatgctggtgattt

SEQ ID NO: 100 - DNA, 25 bp, Artificial Sequence
  Made in the lab
ccgctggagacacaatcatatcttt

SEQ ID NO: 101 - DNA, 25 bp, Artificial Sequence
  Made in the lab
ccttccgatggaagcactagacaaa

SEQ ID NO: 102 - DNA, 25 bp, Artificial Sequence
  Made in the lab
cctgagcctaatagtcccagtgaat

SEQ ID NO: 103 - DNA, 25 bp, Artificial Sequence
  Made in the lab
ccagccgctggagacacaatcatat

SEQ ID NO: 104 - DNA, 25 bp, Artificial Sequence
  Made in the lab
cctctggaaagaaacatgtgagtaa

SEQ ID NO: 105 - DNA, 25 bp, Artificial Sequence
  Made in the lab
ccttgagaagtcagatggtttattt

SEQ ID NO: 106 - DNA, 25 bp, Artificial Sequence
  Made in the lab
gctcctttactttccagaaccctta

SEQ ID NO: 107 - DNA, 25 bp, Artificial Sequence
  Made in the lab
gtcctcatatttgaggaccatgaaa

SEQ ID NO: 108 - DNA, 25 bp, Artificial Sequence
  Made in the lab
ggaggagaggagaaatgtcctcata

SEQ ID NO: 109 - DNA, 25 bp, Artificial Sequence
  Made in the lab
gcagctttcagactccatcctcctt

SEQ ID NO: 110 - DNA, 25 bp, Artificial Sequence
  Made in the lab
gtacatcatctgtaccaacaccaat

SEQ ID NO: 111 - DNA, 25 bp, Artificial Sequence
  Made in the lab
gctctggatgagaaccagctccttt

SEQ ID NO: 112 - DNA, 25 bp, Artificial Sequence
  Made in the lab
tctcccgacacaacattgagggtat

SEQ ID NO: 113 - DNA, 25 bp, Artificial Sequence
  Made in the lab
gtggccattggcagattgcaggtaa

SEQ ID NO: 114 - DNA, 25 bp, Artificial Sequence
  Made in the lab
gccgactcttgtattgcctgctcta

SEQ ID NO: 115 - DNA, 25 bp, Artificial Sequence
  Made in the lab
gtcagtatttcattcttgccagttt

SEQ ID NO: 116 - DNA, 25 bp, Artificial Sequence
  Made in the lab
tcttgccagtttccactgtgtgttt

SEQ ID NO: 117 - DNA, 25 bp, Artificial Sequence
  Made in the lab
tggcagaccttcatcttccttccct

SEQ ID NO: 118 - DNA, 25 bp, Artificial Sequence
  Made in the lab
cttgccagtttccactgtgtgttta

SEQ ID NO: 119 - DNA, 25 bp, Artificial Sequence
  Made in the lab
gcttccactcctctcagcattggta

SEQ ID NO: 120 - DNA, 25 bp, Artificial Sequence
  Made in the lab
tccttccaccttagccttctgagca

SEQ ID NO: 121 - DNA, 25 bp, Artificial Sequence
  Made in the lab
gtgaaactcacatcctatcagtggt

SEQ ID NO: 122 - DNA, 25 bp, Artificial Sequence
  Made in the lab
gactcttgtattgcctgctctagta

SEQ ID NO: 123 - DNA, 25 bp, Artificial Sequence
  Made in the lab
ctgctctagtacaatcagcagctaa

SEQ ID NO: 124 - DNA, 25 bp, Artificial Sequence
  Made in the lab
gggatgttaagcaaaggaaaccaaa

SEQ ID NO: 125 - DNA, 25 bp, Artificial Sequence
  Made in the lab
ggaaaccaaaggaatcgtttcaaat

SEQ ID NO: 126 - DNA, 25 bp, Artificial Sequence
  Made in the lab
gcaaaggaaaccaaaggaatcgttt

SEQ ID NO: 127 - DNA, 25 bp, Artificial Sequence
  Made in the lab
gcagtcagtagtattctaaagcttt

SEQ ID NO: 128 - DNA, 25 bp, Artificial Sequence
  Made in the lab
gtatttgagccctcccagcaagttt

SEQ ID NO: 129 - DNA, 25 bp, Artificial Sequence
  Made in the lab
tctgctgctcccatctgcactaatt

SEQ ID NO: 130 - DNA, 25 bp, Artificial Sequence
  Made in the lab
tcccatctgcactaattgacccaaa

SEQ ID NO: 131 - DNA, 25 bp, Artificial Sequence
  Made in the lab
gctgacatggctttgctttgtgtaa

SEQ ID NO: 132 - DNA, 25 bp, Artificial Sequence
  Made in the lab
gtgatgaatagcgaatcatctcaaa

SEQ ID NO: 133 - DNA, 25 bp, Artificial Sequence
  Made in the lab
tcagtctagtgaagatgttgtcatt

SEQ ID NO: 134 - DNA, 25 bp, Artificial Sequence
  Made in the lab
ccatcagtatcttaatgaaggactt

SEQ ID NO: 135 - DNA, 25 bp, Artificial Sequence
  Made in the lab
cccagatttagggactgataaagat

SEQ ID NO: 136 - DNA, 25 bp, Artificial Sequence
  Made in the lab
ggtgcacccagtttccaccatgatt

SEQ ID NO: 137 - DNA, 25 bp, Artificial Sequence
  Made in the lab
ccatgattaagggtctttacggaat

SEQ ID NO: 138 - DNA, 25 bp, Artificial Sequence
  Made in the lab
ggtggaggttgtgcatgttgtcctt

SEQ ID NO: 139 - DNA, 25 bp, Artificial Sequence
  Made in the lab
ggcaaagactataatgtaactgcaa

SEQ ID NO: 140 - DNA, 25 bp, Artificial Sequence
  Made in the lab
ggaataaaggatgatgtcttcctta

SEQ ID NO: 141 - DNA, 25 bp, Artificial Sequence
  Made in the lab
gctatatcctgatgctggatggtat

SEQ ID NO: 142 - DNA, 25 bp, Artificial Sequence
  Made in the lab
ccaggtggatgtttaccgtgtgtta

SEQ ID NO: 143 - DNA, 25 bp, Artificial Sequence
  Made in the lab
gtctctggcaaagactataatgtaa

SEQ ID NO: 144 - DNA, 25 bp, Artificial Sequence
  Made in the lab
cctgaaactgacgcctgtcgcttat

SEQ ID NO: 145 - DNA, 25 bp, Artificial Sequence
  Made in the lab
gcctgcttgcctacttcctggataa

SEQ ID NO: 146 - DNA, 25 bp, Artificial Sequence
  Made in the lab
gcagaggagatgccctacctgaaat

SEQ ID NO: 147 - DNA, 25 bp, Artificial Sequence
  Made in the lab
gcaatgtgccttagctgccttgaga

SEQ ID NO: 148 - DNA, 25 bp, Artificial Sequence
  Made in the lab
acagggacttgtcgctgatcaaggt

SEQ ID NO: 149 - DNA, 25 bp, Artificial Sequence
  Made in the lab
tgcctgcttgcctacttcctggata

SEQ ID NO: 150 - DNA, 25 bp, Artificial Sequence
  Made in the lab
tgcagaggagatgccctacctgaaa

SEQ ID NO: 151 - DNA, 25 bp, Artificial Sequence
  Made in the lab
cctcttcacaccgtcctgaaactga

SEQ ID NO: 152 - DNA, 25 bp, Artificial Sequence
  Made in the lab
tcctgaaactgacgcctgtcgctta

SEQ ID NO: 153 - DNA, 25 bp, Artificial Sequence
  Made in the lab
tttctccttactaactgtggaagaa

SEQ ID NO: 154 - DNA, 25 bp, Artificial Sequence
  Made in the lab
ccattcgtctgtcccagagcttatt

SEQ ID NO: 155 - DNA, 25 bp, Artificial Sequence
  Made in the lab
acatccgcaaacagagtgagccctt

SEQ ID NO: 156 - DNA, 25 bp, Artificial Sequence
  Made in the lab
acgagctgatgaagagagtgggttt

SEQ ID NO: 157 - DNA, 25 bp, Artificial Sequence
  Made in the lab
cttccatcagtcggatacacacata

SEQ ID NO: 158 - DNA, 25 bp, Artificial Sequence
  Made in the lab
tcggatacacacatattcatcatca

SEQ ID NO: 159 - DNA, 25 bp, Artificial Sequence
  Made in the lab
gctgagatttgccaacaggatcttc

SEQ ID NO: 160 - DNA, 25 bp, Artificial Sequence
  Made in the lab
ccgtcgtcctctatgtggagaatga

SEQ ID NO: 161 - DNA, 25 bp, Artificial Sequence
  Made in the lab
gccgtgtacaccaagatgatgacca

SEQ ID NO: 162 - DNA, 25 bp, Artificial Sequence
  Made in the lab
tgatgaccaagaagccgggcatgtt

SEQ ID NO: 163 - DNA, 25 bp, Artificial Sequence
  Made in the lab
gatgaagagagtgggtttccagtat

SEQ ID NO: 164 - DNA, 59 bp, Artificial Sequence
  Made in the lab
ggtattattcagcacgacttgatttcgaaaaatcaagtcgtgctgaataataccttttt

SEQ ID NO: 165 - DNA, 59 bp, Artificial Sequence
  Made in the lab
gcaatcaatggatgaaagtggattacgaataatccactttcatccattgattgcttttt

SEQ ID NO: 166 - DNA, 59 bp, Artificial Sequence
  Made in the lab
ccatgaggaaatgagagaaatgcttcgaaaagcatttctctcatttcctcatggttttt

SEQ ID NO: 167 - DNA, 59 bp, Artificial Sequence
  Made in the lab
gccacatcatcaccatatagagatacgaatatctctatatggtgatgatgtggcttttt

SEQ ID NO: 168 - DNA, 59 bp, Artificial Sequence
  Made in the lab
ccacagtgcattgtatgtgtgaattcgaaaattcacacatacaatgcactgtggttttt

SEQ ID NO: 169 - DNA, 59 bp, Artificial Sequence
  Made in the lab
ggaaacttctggatgctggtgatttcgaaaaatcaccagcatccagaagtttccttttt

SEQ ID NO: 170 - DNA, 59 bp, Artificial Sequence
  Made in the lab
ccgctggagacacaatcatatctttcgaaaaagatatgattgtgtctccagcggttttt

SEQ ID NO: 171 - DNA, 59 bp, Artificial Sequence
  Made in the lab
ccttccgatggaagcactagacaaacgaatttgtctagtgcttccatcggaaggttttt

SEQ ID NO: 172 - DNA, 59 bp, Artificial Sequence
  Made in the lab
cctgagcctaatagtcccagtgaatcgaaattcactgggactattaggctcaggttttt

SEQ ID NO: 173 - DNA, 59 bp, Artificial Sequence
  Made in the lab
ccagccgctggagacacaatcatatcgaaatatgattgtgtctccagcggctggttttt

SEQ ID NO: 174 - DNA, 59 bp, Artificial Sequence
  Made in the lab
cctctggaaagaaacatgtgagtaacgaattactcacatgtttctttccagaggttttt

SEQ ID NO: 175 - DNA, 59 bp, Artificial Sequence
  Made in the lab
ccttgagaagtcagatggtttatttcgaaaaataaaccatctgacttctcaaggttttt

SEQ ID NO: 176 - DNA, 59 bp, Artificial Sequence
  Made in the lab
gctcctttactttccagaacccttacgaataagggttctggaaagtaaaggagcttttt

SEQ ID NO: 177 - DNA, 59 bp, Artificial Sequence
  Made in the lab
gtcctcatatttgaggaccatgaaacgaatttcatggtcctcaaatatgaggacttttt

SEQ ID NO: 178 - DNA, 59 bp, Artificial Sequence
  Made in the lab
ggaggagaggagaaatgtcctcatacgaatatgaggacatttctcctctcctccttttt

SEQ ID NO: 179 - DNA, 59 bp, Artificial Sequence
  Made in the lab
gcagctttcagactccatcctccttcgaaaaggaggatggagtctgaaagctgcttttt

SEQ ID NO: 180 - DNA, 59 bp, Artificial Sequence
  Made in the lab
gtacatcatctgtaccaacaccaatcgaaattggtgttggtacagatgatgtacttttt

SEQ ID NO: 181 - DNA, 59 bp, Artificial Sequence
  Made in the lab
gctctggatgagaaccagctcctttcgaaaaaggagctggttctcatccagagcttttt

SEQ ID NO: 182 - DNA, 59 bp, Artificial Sequence
  Made in the lab
tctcccgacacaacattgagggtatcgaaataccctcaatgttgtgtcgggagattttt

SEQ ID NO: 183 - DNA, 59 bp, Artificial Sequence
  Made in the lab
gtggccattggcagattgcaggtaacgaattacctgcaatctgccaatggccacttttt

SEQ ID NO: 184 - DNA, 59 bp, Artificial Sequence
  Made in the lab
gccgactcttgtattgcctgctctacgaatagagcaggcaatacaagagtcggcttttt

SEQ ID NO: 185 - DNA, 59 bp, Artificial Sequence
  Made in the lab
gtcagtatttcattcttgccagtttcgaaaaactggcaagaatgaaatactgacttttt

SEQ ID NO: 186 - DNA, 59 bp, Artificial Sequence
  Made in the lab
tcttgccagtttccactgtgtgtttcgaaaaacacacagtggaaactggcaagattttt

SEQ ID NO: 187 - DNA, 59 bp, Artificial Sequence
  Made in the lab
tggcagaccttcatcttccttccctcgaaagggaaggaagatgaaggtctgccattttt

SEQ ID NO: 188 - DNA, 59 bp, Artificial Sequence
  Made in the lab
cttgccagtttccactgtgtgtttacgaataaacacacagtggaaactggcaagttttt

SEQ ID NO: 189 - DNA, 59 bp, Artificial Sequence
  Made in the lab
gcttccactcctctcagcattggtacgaataccaatgctgagaggagtggaagcttttt

SEQ ID NO: 190 - DNA, 59 bp, Artificial Sequence
  Made in the lab
tccttccaccttagccttctgagcacgaatgctcagaaggctaaggtggaaggattttt

SEQ ID NO: 191 - DNA, 59 bp, Artificial Sequence
  Made in the lab
gtgaaactcacatcctatcagtggtcgaaaccactgataggatgtgagtttcacttttt

SEQ ID NO: 192 - DNA, 59 bp, Artificial Sequence
  Made in the lab
gactcttgtattgcctgctctagtacgaatactagagcaggcaatacaagagtcttttt

SEQ ID NO: 193 - DNA, 59 bp, Artificial Sequence
  Made in the lab
ctgctctagtacaatcagcagctaacgaattagctgctgattgtactagagcagttttt

SEQ ID NO: 194 - DNA, 59 bp, Artificial Sequence
  Made in the lab
gggatgttaagcaaaggaaaccaaacgaatttggtttcctttgcttaacatcccttttt

SEQ ID NO: 195 - DNA, 59 bp, Artificial Sequence
  Made in the lab
ggaaaccaaaggaatcgtttcaaatcgaaatttgaaacgattcctttggtttccttttt

SEQ ID NO: 196 - DNA, 59 bp, Artificial Sequence
  Made in the lab
gcaaaggaaaccaaaggaatcgtttcgaaaaacgattcctttggtttcctttgcttttt

SEQ ID NO: 197 - DNA, 59 bp, Artificial Sequence
  Made in the lab
gcagtcagtagtattctaaagctttcgaaaaagctttagaatactactgactgcttttt

SEQ ID NO: 198 - DNA, 59 bp, Artificial Sequence
  Made in the lab
gtatttgagccctcccagcaagtttcgaaaaacttgctgggagggctcaaatacttttt

SEQ ID NO: 199 - DNA, 59 bp, Artificial Sequence
  Made in the lab
tctgctgctcccatctgcactaattcgaaaattagtgcagatgggagcagcagattttt

SEQ ID NO: 200 - DNA, 59 bp, Artificial Sequence
  Made in the lab
tcccatctgcactaattgacccaaacgaatttgggtcaattagtgcagatgggattttt

SEQ ID NO: 201 - DNA, 59 bp, Artificial Sequence
  Made in the lab
gctgacatggctttgctttgtgtaacgaattacacaaagcaaagccatgtcagcttttt

SEQ ID NO: 202 - DNA, 59 bp, Artificial Sequence
  Made in the lab
gtgatgaatagcgaatcatctcaaacgaatttgagatgattcgctattcatcacttttt

SEQ ID NO: 203 - DNA, 59 bp, Artificial Sequence
  Made in the lab
tcagtctagtgaagatgttgtcattcgaaaatgacaacatcttcactagactgattttt

SEQ ID NO: 204 - DNA, 59 bp, Artificial Sequence
  Made in the lab
ccatcagtatcttaatgaaggacttcgaaaagtccttcattaagatactgatggttttt

SEQ ID NO: 205 - DNA, 59 bp, Artificial Sequence
  Made in the lab
cccagatttagggactgataaagatcgaaatctttatcagtccctaaatctgggttttt

SEQ ID NO: 206 - DNA, 59 bp, Artificial Sequence
  Made in the lab
ggtgcacccagtttccaccatgattcgaaaatcatggtggaaactgggtgcaccttttt

SEQ ID NO: 207 - DNA, 59 bp, Artificial Sequence
  Made in the lab
ccatgattaagggtctttacggaatcgaaattccgtaaagacccttaatcatggttttt

SEQ ID NO: 208 - DNA, 59 bp, Artificial Sequence
  Made in the lab
ggtggaggttgtgcatgttgtccttcgaaaaggacaacatgcacaacctccaccttttt

SEQ ID NO: 209 - DNA, 59 bp, Artificial Sequence
  Made in the lab
ggcaaagactataatgtaactgcaacgaattgcagttacattatagtctttgccttttt

SEQ ID NO: 210 - DNA, 59 bp, Artificial Sequence
  Made in the lab
ggaataaaggatgatgtcttccttacgaataaggaagacatcatcctttattccttttt

SEQ ID NO: 211 - DNA, 59 bp, Artificial Sequence
  Made in the lab
gctatatcctgatgctggatggtatcgaaataccatccagcatcaggatatagcttttt

SEQ ID NO: 212 - DNA, 59 bp, Artificial Sequence
  Made in the lab
ccaggtggatgtttaccgtgtgttacgaataacacacggtaaacatccacctggttttt

SEQ ID NO: 213 - DNA, 59 bp, Artificial Sequence
  Made in the lab
gtctctggcaaagactataatgtaacgaattacattatagtctttgccagagacttttt

SEQ ID NO: 214 - DNA, 59 bp, Artificial Sequence
  Made in the lab
cctgaaactgacgcctgtcgcttatcgaaataagcgacaggcgtcagtttcaggttttt

SEQ ID NO: 215 - DNA, 59 bp, Artificial Sequence
  Made in the lab
gcctgcttgcctacttcctggataacgaattatccaggaagtaggcaagcaggcttttt

SEQ ID NO: 216 - DNA, 59 bp, Artificial Sequence
  Made in the lab
gcagaggagatgccctacctgaaatcgaaatttcaggtagggcatctcctctgcttttt

SEQ ID NO: 217 - DNA, 59 bp, Artificial Sequence
  Made in the lab
gcaatgtgccttagctgccttgagacgaatctcaaggcagctaaggcacattgcttttt

SEQ ID NO: 218 - DNA, 59 bp, Artificial Sequence
  Made in the lab
acagggacttgtcgctgatcaaggtcgaaaccttgatcagcgacaagtccctgtttttt

SEQ ID NO: 219 - DNA, 59 bp, Artificial Sequence
  Made in the lab
tgcctgcttgcctacttcctggatacgaatatccaggaagtaggcaagcaggcattttt

SEQ ID NO: 220 - DNA, 59 bp, Artificial Sequence
  Made in the lab
tgcagaggagatgccctacctgaaacgaatttcaggtagggcatctcctctgcattttt

SEQ ID NO: 221 - DNA, 59 bp, Artificial Sequence
  Made in the lab
cctcttcacaccgtcctgaaactgacgaatcagtttcaggacggtgtgaagaggttttt

SEQ ID NO: 222 - DNA, 59 bp, Artificial Sequence
  Made in the lab
tcctgaaactgacgcctgtcgcttacgaataagcgacaggcgtcagtttcaggattttt

SEQ ID NO: 223 - DNA, 59 bp, Artificial Sequence
  Made in the lab
tttctccttactaactgtggaagaacgaattcttccacagttagtaaggagaaattttt

SEQ ID NO: 224 - DNA, 59 bp, Artificial Sequence
  Made in the lab
ccattcgtctgtcccagagcttattcgaaaataagctctgggacagacgaatggttttt

SEQ ID NO: 225 - DNA, 59 bp, Artificial Sequence
  Made in the lab
acatccgcaaacagagtgagcccttcgaaaagggctcactctgtttgcggatgtttttt

SEQ ID NO: 226 - DNA, 59 bp, Artificial Sequence
  Made in the lab
acgagctgatgaagagagtgggtttcgaaaaacccactctcttcatcagctcgtttttt

SEQ ID NO: 227 - DNA, 59 bp, Artificial Sequence
  Made in the lab
cttccatcagtcggatacacacatacgaatatgtgtgtatccgactgatggaagttttt

SEQ ID NO: 228 - DNA, 59 bp, Artificial Sequence
  Made in the lab
tcggatacacacatattcatcatcacgaatgatgatgaatatgtgtgtatccgattttt

SEQ ID NO: 229 - DNA, 59 bp, Artificial Sequence
  Made in the lab
gctgagatttgccaacaggatcttccgaagaagatcctgttggcaaatctcagcttttt

SEQ ID NO: 230 - DNA, 59 bp, Artificial Sequence
  Made in the lab
ccgtcgtcctctatgtggagaatgacgaatcattctccacatagaggacgacggttttt

SEQ ID NO: 231 - DNA, 59 bp, Artificial Sequence
  Made in the lab
gccgtgtacaccaagatgatgaccacgaatggtcatcatcttggtgtacacggcttttt

SEQ ID NO: 232 - DNA, 59 bp, Artificial Sequence
  Made in the lab
tgatgaccaagaagccgggcatgttcgaaaacatgcccggcttcttggtcatcattttt

SEQ ID NO: 233 - DNA, 59 bp, Artificial Sequence
  Made in the lab
gatgaagagagtgggtttccagtatcgaaatactggaaacccactctcttcatcttttt

SEQ ID NO: 234 - DNA, 21 bp, Artificial Sequence
  Made in the lab
ggaacctgatgctttaacttt

SEQ ID NO: 235 - DNA, 22 bp, Artificial Sequence
  Made in the lab
aggaacctgatgctttaacttt

SEQ ID NO: 236 - DNA, 23 bp, Artificial Sequence
  Made in the lab
aaggaacctgatgctttaacttt

SEQ ID NO: 237 - DNA, 24 bp, Artificial Sequence
  Made in the lab
gaaggaacctgatgctttaacttt

SEQ ID NO: 238 - DNA, 25 bp, Artificial Sequence
  Made in the lab
agaaggaacctgatgctttaacttt

SEQ ID NO: 239 - DNA, 26 bp, Artificial Sequence
  Made in the lab
aagaaggaacctgatgctttaacttt

SEQ ID NO: 240 - DNA, 27 bp, Artificial Sequence
  Made in the lab
taagaaggaacctgatgctttaacttt

SEQ ID NO: 241 - DNA, 28 bp, Artificial Sequence
  Made in the lab
ttaagaaggaacctgatgctttaacttt

SEQ ID NO: 242 - DNA, 29 bp, Artificial Sequence
  Made in the lab
cttaagaaggaacctgatgctttaacttt

SEQ ID NO: 243 - DNA, 30 bp, Artificial Sequence
  Made in the lab
acttaagaaggaacctgatgctttaacttt

SEQ ID NO: 244 - DNA, 21 bp, Artificial Sequence
  Made in the lab
cctactgcagggtgaagaatt

SEQ ID NO: 245 - DNA, 22 bp, Artificial Sequence
  Made in the lab
acctactgcagggtgaagaatt

SEQ ID NO: 246 - DNA, 23 bp, Artificial Sequence
  Made in the lab
aacctactgcagggtgaagaatt

SEQ ID NO: 247 - DNA, 24 bp, Artificial Sequence
  Made in the lab
aaacctactgcagggtgaagaatt

SEQ ID NO: 248 - DNA, 25 bp, Artificial Sequence
  Made in the lab
gaaacctactgcagggtgaagaatt

SEQ ID NO: 249 - DNA, 26 bp, Artificial Sequence
  Made in the lab
agaaacctactgcagggtgaagaatt

SEQ ID NO: 250 - DNA, 27 bp, Artificial Sequence
  Made in the lab
cagaaacctactgcagggtgaagaatt

SEQ ID NO: 251 - DNA, 28 bp, Artificial Sequence
  Made in the lab
gcagaaacctactgcagggtgaagaatt

SEQ ID NO: 252 - DNA, 29 bp, Artificial Sequence
  Made in the lab
agcagaaacctactgcagggtgaagaatt

SEQ ID NO: 253 - DNA, 30 bp, Artificial Sequence
  Made in the lab
cagcagaaacctactgcagggtgaagaatt

SEQ ID NO: 254 - DNA, 21 bp, Artificial Sequence
  Made in the lab
ctggacacagtgtgtttgatt

SEQ ID NO: 255 - DNA, 22 bp, Artificial Sequence
  Made in the lab
actggacacagtgtgtttgatt

SEQ ID NO: 256 - DNA, 23 bp, Artificial Sequence
  Made in the lab
aactggacacagtgtgtttgatt

SEQ ID NO: 257 - DNA, 24 bp, Artificial Sequence
  Made in the lab
taactggacacagtgtgtttgatt

SEQ ID NO: 258 - DNA, 25 bp, Artificial Sequence
  Made in the lab
ctaactggacacagtgtgtttgatt

SEQ ID NO: 259 - DNA, 26 bp, Artificial Sequence
  Made in the lab
actaactggacacagtgtgtttgatt

SEQ ID NO: 260 - DNA, 27 bp, Artificial Sequence
  Made in the lab
aactaactggacacagtgtgtttgatt

SEQ ID NO: 261 - DNA, 28 bp, Artificial Sequence
  Made in the lab
gaactaactggacacagtgtgtttgatt

SEQ ID NO: 262 - DNA, 29 bp, Artificial Sequence
  Made in the lab
tgaactaactggacacagtgtgtttgatt

SEQ ID NO: 263 - DNA, 30 bp, Artificial Sequence
  Made in the lab
ttgaactaactggacacagtgtgtttgatt

SEQ ID NO: 264 - DNA, 21 bp, Artificial Sequence
  Made in the lab
gtagcctctttgacaaactta

SEQ ID NO: 265 - DNA, 22 bp, Artificial Sequence
  Made in the lab
agtagcctctttgacaaactta

SEQ ID NO: 266 - DNA, 23 bp, Artificial Sequence
  Made in the lab
aagtagcctctttgacaaactta

SEQ ID NO: 267 - DNA, 24 bp, Artificial Sequence
  Made in the lab
caagtagcctctttgacaaactta

SEQ ID NO: 268 - DNA, 25 bp, Artificial Sequence
  Made in the lab
acaagtagcctctttgacaaactta

SEQ ID NO: 269 - DNA, 26 bp, Artificial Sequence
  Made in the lab
tacaagtagcctctttgacaaactta

SEQ ID NO: 270 - DNA, 27 bp, Artificial Sequence
  Made in the lab
atacaagtagcctctttgacaaactta

SEQ ID NO: 271 - DNA, 28 bp, Artificial Sequence
  Made in the lab
gatacaagtagcctctttgacaaactta

SEQ ID NO: 272 - DNA, 29 bp, Artificial Sequence
  Made in the lab
agatacaagtagcctctttgacaaactta

SEQ ID NO: 273 - DNA, 30 bp, Artificial Sequence
  Made in the lab
aagatacaagtagcctctttgacaaactta

SEQ ID NO: 274 - DNA, 21 bp, Artificial Sequence
  Made in the lab
gccttggatggttttgttatg

SEQ ID NO: 275 - DNA, 22 bp, Artificial Sequence
  Made in the lab
agccttggatggttttgttatg

SEQ ID NO: 276 - DNA, 23 bp, Artificial Sequence
  Made in the lab
aagccttggatggttttgttatg

SEQ ID NO: 277 - DNA, 24 bp, Artificial Sequence
  Made in the lab
aaagccttggatggttttgttatg

SEQ ID NO: 278 - DNA, 25 bp, Artificial Sequence
  Made in the lab
gaaagccttggatggttttgttatg

SEQ ID NO: 279 - DNA, 26 bp, Artificial Sequence
  Made in the lab
tgaaagccttggatggttttgttatg

SEQ ID NO: 280 - DNA, 27 bp, Artificial Sequence
  Made in the lab
ttgaaagccttggatggttttgttatg

SEQ ID NO: 281 - DNA, 28 bp, Artificial Sequence
  Made in the lab
tttgaaagccttggatggttttgttatg

SEQ ID NO: 282 - DNA, 29 bp, Artificial Sequence
  Made in the lab
atttgaaagccttggatggttttgttatg

SEQ ID NO: 283 - DNA, 30 bp, Artificial Sequence
  Made in the lab
tatttgaaagccttggatggttttgttatg

SEQ ID NO: 284 - DNA, 21 bp, Artificial Sequence
  Made in the lab
cacacagcgaagcttttttct

SEQ ID NO: 285 - DNA, 22 bp, Artificial Sequence
  Made in the lab
acacacagcgaagcttttttct

SEQ ID NO: 286 - DNA, 23 bp, Artificial Sequence
  Made in the lab
aacacacagcgaagcttttttct

SEQ ID NO: 287 - DNA, 24 bp, Artificial Sequence
  Made in the lab
aaacacacagcgaagcttttttct

SEQ ID NO: 288 - DNA, 25 bp, Artificial Sequence
  Made in the lab
aaaacacacagcgaagcttttttct

SEQ ID NO: 289 - DNA, 26 bp, Artificial Sequence
  Made in the lab
caaaacacacagcgaagcttttttct

SEQ ID NO: 290 - DNA, 27 bp, Artificial Sequence
  Made in the lab
acaaaacacacagcgaagcttttttct

SEQ ID NO: 291 - DNA, 28 bp, Artificial Sequence
  Made in the lab
aacaaaacacacagcgaagcttttttct

SEQ ID NO: 292 - DNA, 29 bp, Artificial Sequence
  Made in the lab
gaacaaaacacacagcgaagcttttttct

SEQ ID NO: 293 - DNA, 30 bp, Artificial Sequence
  Made in the lab
agaacaaaacacacagcgaagcttttttct

SEQ ID NO: 294 - DNA, 21 bp, Artificial Sequence
  Made in the lab
cctcagtgtgggtataagaaa

SEQ ID NO: 295 - DNA, 22 bp, Artificial Sequence
  Made in the lab
acctcagtgtgggtataagaaa

SEQ ID NO: 296 - DNA, 23 bp, Artificial Sequence
  Made in the lab
aacctcagtgtgggtataagaaa

SEQ ID NO: 297 - DNA, 24 bp, Artificial Sequence
  Made in the lab
caacctcagtgtgggtataagaaa

SEQ ID NO: 298 - DNA, 25 bp, Artificial Sequence
  Made in the lab
ccaacctcagtgtgggtataagaaa

SEQ ID NO: 299 - DNA, 26 bp, Artificial Sequence
  Made in the lab
accaacctcagtgtgggtataagaaa

SEQ ID NO: 300 - DNA, 27 bp, Artificial Sequence
  Made in the lab
aaccaacctcagtgtgggtataagaaa

SEQ ID NO: 301 - DNA, 28 bp, Artificial Sequence
  Made in the lab
taaccaacctcagtgtgggtataagaaa

SEQ ID NO: 302 - DNA, 29 bp, Artificial Sequence
  Made in the lab
gtaaccaacctcagtgtgggtataagaaa

SEQ ID NO: 303 - DNA, 30 bp, Artificial Sequence
  Made in the lab
agtaaccaacctcagtgtgggtataagaaa

SEQ ID NO: 304 - DNA, 21 bp, Artificial Sequence
  Made in the lab
gaacttttaggccgctcaatt

SEQ ID NO: 305 - DNA, 22 bp, Artificial Sequence
  Made in the lab
agaacttttaggccgctcaatt

SEQ ID NO: 306 - DNA, 23 bp, Artificial Sequence
  Made in the lab
aagaacttttaggccgctcaatt

SEQ ID NO: 307 - DNA, 24 bp, Artificial Sequence
  Made in the lab
gaagaacttttaggccgctcaatt

SEQ ID NO: 308 - DNA, 25 bp, Artificial Sequence
  Made in the lab
agaagaacttttaggccgctcaatt

SEQ ID NO: 309 - DNA, 26 bp, Artificial Sequence
  Made in the lab
cagaagaacttttaggccgctcaatt

SEQ ID NO: 310 - DNA, 27 bp, Artificial Sequence
  Made in the lab
ccagaagaacttttaggccgctcaatt

SEQ ID NO: 311 - DNA, 28 bp, Artificial Sequence
  Made in the lab
gccagaagaacttttaggccgctcaatt

SEQ ID NO: 312 - DNA, 29 bp, Artificial Sequence
  Made in the lab
agccagaagaacttttaggccgctcaatt

SEQ ID NO: 313 - DNA, 30 bp, Artificial Sequence
  Made in the lab
gagccagaagaacttttaggccgctcaatt

SEQ ID NO: 314 - DNA, 21 bp, Artificial Sequence
  Made in the lab
cttttaggccgctcaatttat

SEQ ID NO: 315 - DNA, 22 bp, Artificial Sequence
  Made in the lab
acttttaggccgctcaatttat

SEQ ID NO: 316 - DNA, 23 bp, Artificial Sequence
  Made in the lab
aacttttaggccgctcaatttat

SEQ ID NO: 317 - DNA, 24 bp, Artificial Sequence
  Made in the lab
gaacttttaggccgctcaatttat

SEQ ID NO: 318 - DNA, 25 bp, Artificial Sequence
  Made in the lab
agaacttttaggccgctcaatttat

SEQ ID NO: 319 - DNA, 26 bp, Artificial Sequence
  Made in the lab
aagaacttttaggccgctcaatttat

SEQ ID NO: 320 - DNA, 27 bp, Artificial Sequence
  Made in the lab
gaagaacttttaggccgctcaatttat

SEQ ID NO: 321 - DNA, 28 bp, Artificial Sequence
  Made in the lab
agaagaacttttaggccgctcaatttat

SEQ ID NO: 322 - DNA, 29 bp, Artificial Sequence
  Made in the lab
cagaagaacttttaggccgctcaatttat

SEQ ID NO: 323 - DNA, 30 bp, Artificial Sequence
  Made in the lab
ccagaagaacttttaggccgctcaatttat

SEQ ID NO: 324 - DNA, 21 bp, Artificial Sequence
  Made in the lab
ccggttgaatcttcagatatg

SEQ ID NO: 325 - DNA, 22 bp, Artificial Sequence
  Made in the lab
accggttgaatcttcagatatg

SEQ ID NO: 326 - DNA, 23 bp, Artificial Sequence
  Made in the lab
aaccggttgaatcttcagatatg

SEQ ID NO: 327 - DNA, 24 bp, Artificial Sequence
  Made in the lab
aaaccggttgaatcttcagatatg

SEQ ID NO: 328 - DNA, 25 bp, Artificial Sequence
  Made in the lab
taaaccggttgaatcttcagatatg

SEQ ID NO: 329 - DNA, 26 bp, Artificial Sequence
  Made in the lab
ttaaaccggttgaatcttcagatatg

SEQ ID NO: 330 - DNA, 27 bp, Artificial Sequence
  Made in the lab
cttaaaccggttgaatcttcagatatg

SEQ ID NO: 331 - DNA, 28 bp, Artificial Sequence
  Made in the lab
ccttaaaccggttgaatcttcagatatg

SEQ ID NO: 332 - DNA, 29 bp, Artificial Sequence
  Made in the lab
tccttaaaccggttgaatcttcagatatg

SEQ ID NO: 333 - DNA, 30 bp, Artificial Sequence
  Made in the lab
gtccttaaaccggttgaatcttcagatatg

SEQ ID NO: 334 - DNA, 21 bp, Artificial Sequence
  Made in the lab
gaaggaacctgatgctttaac

SEQ ID NO: 335 - DNA, 22 bp, Artificial Sequence
  Made in the lab
agaaggaacctgatgctttaac

SEQ ID NO: 336 - DNA, 23 bp, Artificial Sequence
  Made in the lab
aagaaggaacctgatgctttaac

SEQ ID NO: 337 - DNA, 24 bp, Artificial Sequence
  Made in the lab
taagaaggaacctgatgctttaac

SEQ ID NO: 338 - DNA, 25 bp, Artificial Sequence
  Made in the lab
ttaagaaggaacctgatgctttaac

SEQ ID NO: 339 - DNA, 26 bp, Artificial Sequence
  Made in the lab
cttaagaaggaacctgatgctttaac

SEQ ID NO: 340 - DNA, 27 bp, Artificial Sequence
  Made in the lab
acttaagaaggaacctgatgctttaac

SEQ ID NO: 341 - DNA, 28 bp, Artificial Sequence
  Made in the lab
aacttaagaaggaacctgatgctttaac

SEQ ID NO: 342 - DNA, 29 bp, Artificial Sequence
  Made in the lab
aaacttaagaaggaacctgatgctttaac

SEQ ID NO: 343 - DNA, 30 bp, Artificial Sequence
  Made in the lab
caaacttaagaaggaacctgatgctttaac

SEQ ID NO: 344 - DNA, 21 bp, Artificial Sequence
  Made in the lab
atccagagtcactggaacttt

SEQ ID NO: 345 - DNA, 22 bp, Artificial Sequence
  Made in the lab
aatccagagtcactggaacttt

SEQ ID NO: 346 - DNA, 23 bp, Artificial Sequence
  Made in the lab
aaatccagagtcactggaacttt

SEQ ID NO: 347 - DNA, 24 bp, Artificial Sequence
  Made in the lab
caaatccagagtcactggaacttt

SEQ ID NO: 348 - DNA, 25 bp, Artificial Sequence
  Made in the lab
ccaaatccagagtcactggaacttt

SEQ ID NO: 349 - DNA, 26 bp, Artificial Sequence
  Made in the lab
accaaatccagagtcactggaacttt

SEQ ID NO: 350 - DNA, 27 bp, Artificial Sequence
  Made in the lab
aaccaaatccagagtcactggaacttt

SEQ ID NO: 351 - DNA, 28 bp, Artificial Sequence
  Made in the lab
gaaccaaatccagagtcactggaacttt

SEQ ID NO: 352 - DNA, 29 bp, Artificial Sequence
  Made in the lab
agaaccaaatccagagtcactggaacttt

SEQ ID NO: 353 - DNA, 30 bp, Artificial Sequence
  Made in the lab
tagaaccaaatccagagtcactggaacttt

SEQ ID NO: 354 - DNA, 21 bp, Artificial Sequence
  Made in the lab
tagtcccagtgaatattgttt

SEQ ID NO: 355 - DNA, 22 bp, Artificial Sequence
  Made in the lab
atagtcccagtgaatattgttt

SEQ ID NO: 356 - DNA, 23 bp, Artificial Sequence
  Made in the lab
aatagtcccagtgaatattgttt

SEQ ID NO: 357 - DNA, 24 bp, Artificial Sequence
  Made in the lab
taatagtcccagtgaatattgttt

SEQ ID NO: 358 - DNA, 25 bp, Artificial Sequence
  Made in the lab
ctaatagtcccagtgaatattgttt

SEQ ID NO: 359 - DNA, 26 bp, Artificial Sequence
  Made in the lab
cctaatagtcccagtgaatattgttt

SEQ ID NO: 360 - DNA, 27 bp, Artificial Sequence
  Made in the lab
gcctaatagtcccagtgaatattgttt

SEQ ID NO: 361 - DNA, 28 bp, Artificial Sequence
  Made in the lab
agcctaatagtcccagtgaatattgttt

SEQ ID NO: 362 - DNA, 29 bp, Artificial Sequence
  Made in the lab
gagcctaatagtcccagtgaatattgttt

SEQ ID NO: 363 - DNA, 30 bp, Artificial Sequence
  Made in the lab
tgagcctaatagtcccagtgaatattgttt

SEQ ID NO: 364 - DNA, 21 bp, Artificial Sequence
  Made in the lab
gaaggcagtaacctttcatca

SEQ ID NO: 365 - DNA, 22 bp, Artificial Sequence
  Made in the lab
agaaggcagtaacctttcatca

SEQ ID NO: 366 - DNA, 23 bp, Artificial Sequence
  Made in the lab
aagaaggcagtaacctttcatca

SEQ ID NO: 367 - DNA, 24 bp, Artificial Sequence
  Made in the lab
taagaaggcagtaacctttcatca

SEQ ID NO: 368 - DNA, 25 bp, Artificial Sequence
  Made in the lab
gtaagaaggcagtaacctttcatca

SEQ ID NO: 369 - DNA, 26 bp, Artificial Sequence
  Made in the lab
tgtaagaaggcagtaacctttcatca

SEQ ID NO: 370 - DNA, 27 bp, Artificial Sequence
  Made in the lab
ttgtaagaaggcagtaacctttcatca

SEQ ID NO: 371 - DNA, 28 bp, Artificial Sequence
  Made in the lab
tttgtaagaaggcagtaacctttcatca

SEQ ID NO: 372 - DNA, 29 bp, Artificial Sequence
  Made in the lab
ttttgtaagaaggcagtaacctttcatca

SEQ ID NO: 373 - DNA, 30 bp, Artificial Sequence
  Made in the lab
tttttgtaagaaggcagtaacctttcatca

SEQ ID NO: 374 - DNA, 21 bp, Artificial Sequence
  Made in the lab
gcacagatgaattgcttttat

SEQ ID NO: 375 - DNA, 22 bp, Artificial Sequence
  Made in the lab
agcacagatgaattgcttttat

SEQ ID NO: 376 - DNA, 23 bp, Artificial Sequence
  Made in the lab
aagcacagatgaattgcttttat

SEQ ID NO: 377 - DNA, 24 bp, Artificial Sequence
  Made in the lab
aaagcacagatgaattgcttttat

SEQ ID NO: 378 - DNA, 25 bp, Artificial Sequence
  Made in the lab
gaaagcacagatgaattgcttttat

SEQ ID NO: 379 - DNA, 26 bp, Artificial Sequence
  Made in the lab
tgaaagcacagatgaattgcttttat

SEQ ID NO: 380 - DNA, 27 bp, Artificial Sequence
  Made in the lab
atgaaagcacagatgaattgcttttat

SEQ ID NO: 381 - DNA, 28 bp, Artificial Sequence
  Made in the lab
catgaaagcacagatgaattgcttttat

SEQ ID NO: 382 - DNA, 29 bp, Artificial Sequence
  Made in the lab
acatgaaagcacagatgaattgcttttat

SEQ ID NO: 383 - DNA, 30 bp, Artificial Sequence
  Made in the lab
gacatgaaagcacagatgaattgcttttat

SEQ ID NO: 384 - DNA, 21 bp, Artificial Sequence
  Made in the lab
agccttggatggttttgttat

SEQ ID NO: 385 - DNA, 22 bp, Artificial Sequence
  Made in the lab
aagccttggatggttttgttat

SEQ ID NO: 386 - DNA, 23 bp, Artificial Sequence
  Made in the lab
aaagccttggatggttttgttat

SEQ ID NO: 387 - DNA, 24 bp, Artificial Sequence
  Made in the lab
gaaagccttggatggttttgttat

SEQ ID NO: 388 - DNA, 25 bp, Artificial Sequence
  Made in the lab
tgaaagccttggatggttttgttat

SEQ ID NO: 389 - DNA, 26 bp, Artificial Sequence
  Made in the lab
ttgaaagccttggatggttttgttat

SEQ ID NO: 390 - DNA, 27 bp, Artificial Sequence
  Made in the lab
tttgaaagccttggatggttttgttat

SEQ ID NO: 391 - DNA, 28 bp, Artificial Sequence
  Made in the lab
atttgaaagccttggatggttttgttat

SEQ ID NO: 392 - DNA, 29 bp, Artificial Sequence
  Made in the lab
tatttgaaagccttggatggttttgttat

SEQ ID NO: 393 - DNA, 30 bp, Artificial Sequence
  Made in the lab
ttatttgaaagccttggatggttttgttat

SEQ ID NO: 394 - DNA, 21 bp, Artificial Sequence
  Made in the lab
acacacagcgaagcttttttc

SEQ ID NO: 395 - DNA, 22 bp, Artificial Sequence
  Made in the lab
aacacacagcgaagcttttttc

SEQ ID NO: 396 - DNA, 23 bp, Artificial Sequence
  Made in the lab
aaacacacagcgaagcttttttc

SEQ ID NO: 397 - DNA, 24 bp, Artificial Sequence
  Made in the lab
aaaacacacagcgaagcttttttc

SEQ ID NO: 398 - DNA, 25 bp, Artificial Sequence
  Made in the lab
caaaacacacagcgaagcttttttc

SEQ ID NO: 399 - DNA, 26 bp, Artificial Sequence
  Made in the lab
acaaaacacacagcgaagcttttttc

SEQ ID NO: 400 - DNA, 27 bp, Artificial Sequence
  Made in the lab
aacaaaacacacagcgaagcttttttc

SEQ ID NO: 401 - DNA, 28 bp, Artificial Sequence
  Made in the lab
gaacaaaacacacagcgaagcttttttc

SEQ ID NO: 402 - DNA, 29 bp, Artificial Sequence
  Made in the lab
agaacaaaacacacagcgaagcttttttc

SEQ ID NO: 403 - DNA, 30 bp, Artificial Sequence
  Made in the lab
aagaacaaaacacacagcgaagcttttttc

SEQ ID NO: 404 - DNA, 21 bp, Artificial Sequence
  Made in the lab
cccattcctcacccatcaaat

SEQ ID NO: 405 - DNA, 22 bp, Artificial Sequence
  Made in the lab
acccattcctcacccatcaaat

SEQ ID NO: 406 - DNA, 23 bp, Artificial Sequence
  Made in the lab
aacccattcctcacccatcaaat

SEQ ID NO: 407 - DNA, 24 bp, Artificial Sequence
  Made in the lab
gaacccattcctcacccatcaaat

SEQ ID NO: 408 - DNA, 25 bp, Artificial Sequence
  Made in the lab
tgaacccattcctcacccatcaaat

SEQ ID NO: 409 - DNA, 26 bp, Artificial Sequence
  Made in the lab
gtgaacccattcctcacccatcaaat

SEQ ID NO: 410 - DNA, 27 bp, Artificial Sequence
  Made in the lab
tgtgaacccattcctcacccatcaaat

SEQ ID NO: 411 - DNA, 28 bp, Artificial Sequence
  Made in the lab
ttgtgaacccattcctcacccatcaaat

SEQ ID NO: 412 - DNA, 29 bp, Artificial Sequence
  Made in the lab
tttgtgaacccattcctcacccatcaaat

SEQ ID NO: 413 - DNA, 30 bp, Artificial Sequence
  Made in the lab
atttgtgaacccattcctcacccatcaaat

SEQ ID NO: 414 - DNA, 21 bp, Artificial Sequence
  Made in the lab
caccaagaattctcaaccaca

SEQ ID NO: 415 - DNA, 22 bp, Artificial Sequence
  Made in the lab
acaccaagaattctcaaccaca

SEQ ID NO: 416 - DNA, 23 bp, Artificial Sequence
  Made in the lab
aacaccaagaattctcaaccaca

SEQ ID NO: 417 - DNA, 24 bp, Artificial Sequence
  Made in the lab
taacaccaagaattctcaaccaca

SEQ ID NO: 418 - DNA, 25 bp, Artificial Sequence
  Made in the lab
ataacaccaagaattctcaaccaca

SEQ ID NO: 419 - DNA, 26 bp, Artificial Sequence
  Made in the lab
tataacaccaagaattctcaaccaca

SEQ ID NO: 420 - DNA, 27 bp, Artificial Sequence
  Made in the lab
atataacaccaagaattctcaaccaca

SEQ ID NO: 421 - DNA, 28 bp, Artificial Sequence
  Made in the lab
tatataacaccaagaattctcaaccaca

SEQ ID NO: 422 - DNA, 29 bp, Artificial Sequence
  Made in the lab
atatataacaccaagaattctcaaccaca

SEQ ID NO: 423 - DNA, 30 bp, Artificial Sequence
  Made in the lab
catatataacaccaagaattctcaaccaca

SEQ ID NO: 424 - DNA, 21 bp, Artificial Sequence
  Made in the lab
agttcacctgagcctaatagt

SEQ ID NO: 425 - DNA, 22 bp, Artificial Sequence
  Made in the lab
aagttcacctgagcctaatagt

SEQ ID NO: 426 - DNA, 23 bp, Artificial Sequence
  Made in the lab
aaagttcacctgagcctaatagt

SEQ ID NO: 427 - DNA, 24 bp, Artificial Sequence
  Made in the lab
caaagttcacctgagcctaatagt

SEQ ID NO: 428 - DNA, 25 bp, Artificial Sequence
  Made in the lab
acaaagttcacctgagcctaatagt

SEQ ID NO: 429 - DNA, 26 bp, Artificial Sequence
  Made in the lab
gacaaagttcacctgagcctaatagt

SEQ ID NO: 430 - DNA, 27 bp, Artificial Sequence
  Made in the lab
agacaaagttcacctgagcctaatagt

SEQ ID NO: 431 - DNA, 28 bp, Artificial Sequence
  Made in the lab
tagacaaagttcacctgagcctaatagt

SEQ ID NO: 432 - DNA, 29 bp, Artificial Sequence
  Made in the lab
ctagacaaagttcacctgagcctaatagt

SEQ ID NO: 433 - DNA, 30 bp, Artificial Sequence
  Made in the lab
actagacaaagttcacctgagcctaatagt

SEQ ID NO: 434 - DNA, 21 bp, Artificial Sequence
  Made in the lab
gcacagttacagtattccagc

SEQ ID NO: 435 - DNA, 22 bp, Artificial Sequence
  Made in the lab
agcacagttacagtattccagc

SEQ ID NO: 436 - DNA, 23 bp, Artificial Sequence
  Made in the lab
aagcacagttacagtattccagc

SEQ ID NO: 437 - DNA, 24 bp, Artificial Sequence
  Made in the lab
aaagcacagttacagtattccagc

SEQ ID NO: 438 - DNA, 25 bp, Artificial Sequence
  Made in the lab
caaagcacagttacagtattccagc

SEQ ID NO: 439 - DNA, 26 bp, Artificial Sequence
  Made in the lab
tcaaagcacagttacagtattccagc

SEQ ID NO: 440 - DNA, 27 bp, Artificial Sequence
  Made in the lab
ctcaaagcacagttacagtattccagc

SEQ ID NO: 441 - DNA, 28 bp, Artificial Sequence
  Made in the lab
cctcaaagcacagttacagtattccagc

SEQ ID NO: 442 - DNA, 29 bp, Artificial Sequence
  Made in the lab
tcctcaaagcacagttacagtattccagc

SEQ ID NO: 443 - DNA, 30 bp, Artificial Sequence
  Made in the lab
gtcctcaaagcacagttacagtattccagc

SEQ ID NO: 444 - DNA, 21 bp, Artificial Sequence
  Made in the lab
ctacagttcctgaggaagaac

SEQ ID NO: 445 - DNA, 22 bp, Artificial Sequence
  Made in the lab
actacagttcctgaggaagaac

SEQ ID NO: 446 - DNA, 23 bp, Artificial Sequence
  Made in the lab
aactacagttcctgaggaagaac

SEQ ID NO: 447 - DNA, 24 bp, Artificial Sequence
  Made in the lab
gaactacagttcctgaggaagaac

SEQ ID NO: 448 - DNA, 25 bp, Artificial Sequence
  Made in the lab
agaactacagttcctgaggaagaac

SEQ ID NO: 449 - DNA, 26 bp, Artificial Sequence
  Made in the lab
aagaactacagttcctgaggaagaac

SEQ ID NO: 450 - DNA, 27 bp, Artificial Sequence
  Made in the lab
aaagaactacagttcctgaggaagaac

SEQ ID NO: 451 - DNA, 28 bp, Artificial Sequence
  Made in the lab
caaagaactacagttcctgaggaagaac

SEQ ID NO: 452 - DNA, 29 bp, Artificial Sequence
  Made in the lab
tcaaagaactacagttcctgaggaagaac

SEQ ID NO: 453 - DNA, 30 bp, Artificial Sequence
  Made in the lab
gtcaaagaactacagttcctgaggaagaac

SEQ ID NO: 454 - DNA, 21 bp, Artificial Sequence
  Made in the lab
gctactacatcactttcttgg

SEQ ID NO: 455 - DNA, 22 bp, Artificial Sequence
  Made in the lab
agctactacatcactttcttgg

SEQ ID NO: 456 - DNA, 23 bp, Artificial Sequence
  Made in the lab
cagctactacatcactttcttgg

SEQ ID NO: 457 - DNA, 24 bp, Artificial Sequence
  Made in the lab
gcagctactacatcactttcttgg

SEQ ID NO: 458 - DNA, 25 bp, Artificial Sequence
  Made in the lab
tgcagctactacatcactttcttgg

SEQ ID NO: 459 - DNA, 26 bp, Artificial Sequence
  Made in the lab
atgcagctactacatcactttcttgg

SEQ ID NO: 460 - DNA, 27 bp, Artificial Sequence
  Made in the lab
catgcagctactacatcactttcttgg

SEQ ID NO: 461 - DNA, 28 bp, Artificial Sequence
  Made in the lab
tcatgcagctactacatcactttcttgg

SEQ ID NO: 462 - DNA, 29 bp, Artificial Sequence
  Made in the lab
atcatgcagctactacatcactttcttgg

SEQ ID NO: 463 - DNA, 30 bp, Artificial Sequence
  Made in the lab
gatcatgcagctactacatcactttcttgg

SEQ ID NO: 464 - DNA, 21 bp, Artificial Sequence
  Made in the lab
cctggaacatgacattgttaa

SEQ ID NO: 465 - DNA, 22 bp, Artificial Sequence
  Made in the lab
acctggaacatgacattgttaa

SEQ ID NO: 466 - DNA, 23 bp, Artificial Sequence
  Made in the lab
aacctggaacatgacattgttaa

SEQ ID NO: 467 - DNA, 24 bp, Artificial Sequence
  Made in the lab
aaacctggaacatgacattgttaa

SEQ ID NO: 468 - DNA, 25 bp, Artificial Sequence
  Made in the lab
taaacctggaacatgacattgttaa

SEQ ID NO: 469 - DNA, 26 bp, Artificial Sequence
  Made in the lab
ttaaacctggaacatgacattgttaa

SEQ ID NO: 470 - DNA, 27 bp, Artificial Sequence
  Made in the lab
gttaaacctggaacatgacattgttaa

SEQ ID NO: 471 - DNA, 28 bp, Artificial Sequence
  Made in the lab
tgttaaacctggaacatgacattgttaa

SEQ ID NO: 472 - DNA, 29 bp, Artificial Sequence
  Made in the lab
ttgttaaacctggaacatgacattgttaa

SEQ ID NO: 473 - DNA, 30 bp, Artificial Sequence
  Made in the lab
attgttaaacctggaacatgacattgttaa

SEQ ID NO: 474 - DNA, 21 bp, Artificial Sequence
  Made in the lab
cagctacaacaatgaagaatt

SEQ ID NO: 475 - DNA, 22 bp, Artificial Sequence
  Made in the lab
acagctacaacaatgaagaatt

SEQ ID NO: 476 - DNA, 23 bp, Artificial Sequence
  Made in the lab
aacagctacaacaatgaagaatt

SEQ ID NO: 477 - DNA, 24 bp, Artificial Sequence
  Made in the lab
caacagctacaacaatgaagaatt

SEQ ID NO: 478 - DNA, 25 bp, Artificial Sequence
  Made in the lab
gcaacagctacaacaatgaagaatt

SEQ ID NO: 479 - DNA, 26 bp, Artificial Sequence
  Made in the lab
agcaacagctacaacaatgaagaatt

SEQ ID NO: 480 - DNA, 27 bp, Artificial Sequence
  Made in the lab
gagcaacagctacaacaatgaagaatt

SEQ ID NO: 481 - DNA, 28 bp, Artificial Sequence
  Made in the lab
agagcaacagctacaacaatgaagaatt

SEQ ID NO: 482 - DNA, 29 bp, Artificial Sequence
  Made in the lab
cagagcaacagctacaacaatgaagaatt

SEQ ID NO: 483 - DNA, 30 bp, Artificial Sequence
  Made in the lab
tcagagcaacagctacaacaatgaagaatt

SEQ ID NO: 484 - DNA, 21 bp, Artificial Sequence
  Made in the lab
ggcacattgtgtctttaattt

SEQ ID NO: 485 - DNA, 22 bp, Artificial Sequence
  Made in the lab
aggcacattgtgtctttaattt

SEQ ID NO: 486 - DNA, 23 bp, Artificial Sequence
  Made in the lab
aaggcacattgtgtctttaattt

SEQ ID NO: 487 - DNA, 24 bp, Artificial Sequence
  Made in the lab
taaggcacattgtgtctttaattt

SEQ ID NO: 488 - DNA, 25 bp, Artificial Sequence
  Made in the lab
ataaggcacattgtgtctttaattt

SEQ ID NO: 489 - DNA, 26 bp, Artificial Sequence
  Made in the lab
cataaggcacattgtgtctttaattt

SEQ ID NO: 490 - DNA, 27 bp, Artificial Sequence
  Made in the lab
acataaggcacattgtgtctttaattt

SEQ ID NO: 491 - DNA, 28 bp, Artificial Sequence
  Made in the lab
aacataaggcacattgtgtctttaattt

SEQ ID NO: 492 - DNA, 29 bp, Artificial Sequence
  Made in the lab
aaacataaggcacattgtgtctttaattt

SEQ ID NO: 493 - DNA, 30 bp, Artificial Sequence
  Made in the lab
caaacataaggcacattgtgtctttaattt

SEQ ID NO: 494 - DNA, 21 bp, Artificial Sequence
  Made in the lab
ctaggtcccacagctaattta

SEQ ID NO: 495 - DNA, 22 bp, Artificial Sequence
  Made in the lab
actaggtcccacagctaattta

SEQ ID NO: 496 - DNA, 23 bp, Artificial Sequence
  Made in the lab
aactaggtcccacagctaattta

SEQ ID NO: 497 - DNA, 24 bp, Artificial Sequence
  Made in the lab
caactaggtcccacagctaattta

SEQ ID NO: 498 - DNA, 25 bp, Artificial Sequence
  Made in the lab
acaactaggtcccacagctaattta

SEQ ID NO: 499 - DNA, 26 bp, Artificial Sequence
  Made in the lab
cacaactaggtcccacagctaattta

SEQ ID NO: 500 - DNA, 27 bp, Artificial Sequence
  Made in the lab
ccacaactaggtcccacagctaattta

SEQ ID NO: 501 - DNA, 28 bp, Artificial Sequence
  Made in the lab
gccacaactaggtcccacagctaattta

SEQ ID NO: 502 - DNA, 29 bp, Artificial Sequence
  Made in the lab
ggccacaactaggtcccacagctaattta

SEQ ID NO: 503 - DNA, 30 bp, Artificial Sequence
  Made in the lab
aggccacaactaggtcccacagctaattta

SEQ ID NO: 504 - DNA, 21 bp, Artificial Sequence
  Made in the lab
cccttactcagatgaaattga

SEQ ID NO: 505 - DNA, 22 bp, Artificial Sequence
  Made in the lab
acccttactcagatgaaattga

SEQ ID NO: 506 - DNA, 23 bp, Artificial Sequence
  Made in the lab
aacccttactcagatgaaattga

SEQ ID NO: 507 - DNA, 24 bp, Artificial Sequence
  Made in the lab
gaacccttactcagatgaaattga

SEQ ID NO: 508 - DNA, 25 bp, Artificial Sequence
  Made in the lab
agaacccttactcagatgaaattga

SEQ ID NO: 509 - DNA, 26 bp, Artificial Sequence
  Made in the lab
cagaacccttactcagatgaaattga

SEQ ID NO: 510 - DNA, 27 bp, Artificial Sequence
  Made in the lab
ccagaacccttactcagatgaaattga

SEQ ID NO: 511 - DNA, 28 bp, Artificial Sequence
  Made in the lab
tccagaacccttactcagatgaaattga

SEQ ID NO: 512 - DNA, 29 bp, Artificial Sequence
  Made in the lab
ttccagaacccttactcagatgaaattga

SEQ ID NO: 513 - DNA, 30 bp, Artificial Sequence
  Made in the lab
tttccagaacccttactcagatgaaattga

SEQ ID NO: 514 - DNA, 21 bp, Artificial Sequence
  Made in the lab
cagggtcacttggtaattaac

SEQ ID NO: 515 - DNA, 22 bp, Artificial Sequence
  Made in the lab
acagggtcacttggtaattaac

SEQ ID NO: 516 - DNA, 23 bp, Artificial Sequence
  Made in the lab
aacagggtcacttggtaattaac

SEQ ID NO: 517 - DNA, 24 bp, Artificial Sequence
  Made in the lab
caacagggtcacttggtaattaac

SEQ ID NO: 518 - DNA, 25 bp, Artificial Sequence
  Made in the lab
tcaacagggtcacttggtaattaac

SEQ ID NO: 519 - DNA, 26 bp, Artificial Sequence
  Made in the lab
ctcaacagggtcacttggtaattaac

SEQ ID NO: 520 - DNA, 27 bp, Artificial Sequence
  Made in the lab
tctcaacagggtcacttggtaattaac

SEQ ID NO: 521 - DNA, 28 bp, Artificial Sequence
  Made in the lab
atctcaacagggtcacttggtaattaac

SEQ ID NO: 522 - DNA, 29 bp, Artificial Sequence
  Made in the lab
catctcaacagggtcacttggtaattaac

SEQ ID NO: 523 - DNA, 30 bp, Artificial Sequence
  Made in the lab
ccatctcaacagggtcacttggtaattaac

SEQ ID NO: 524 - DNA, 21 bp, Artificial Sequence
  Made in the lab
gaggccaaaggaatgtccatt

SEQ ID NO: 525 - DNA, 22 bp, Artificial Sequence
  Made in the lab
agaggccaaaggaatgtccatt

SEQ ID NO: 526 - DNA, 23 bp, Artificial Sequence
  Made in the lab
aagaggccaaaggaatgtccatt

SEQ ID NO: 527 - DNA, 24 bp, Artificial Sequence
  Made in the lab
gaagaggccaaaggaatgtccatt

SEQ ID NO: 528 - DNA, 25 bp, Artificial Sequence
  Made in the lab
tgaagaggccaaaggaatgtccatt

SEQ ID NO: 529 - DNA, 26 bp, Artificial Sequence
  Made in the lab
ttgaagaggccaaaggaatgtccatt

SEQ ID NO: 530 - DNA, 27 bp, Artificial Sequence
  Made in the lab
cttgaagaggccaaaggaatgtccatt

SEQ ID NO: 531 - DNA, 28 bp, Artificial Sequence
  Made in the lab
ccttgaagaggccaaaggaatgtccatt

SEQ ID NO: 532 - DNA, 29 bp, Artificial Sequence
  Made in the lab
gccttgaagaggccaaaggaatgtccatt

SEQ ID NO: 533 - DNA, 30 bp, Artificial Sequence
  Made in the lab
ggccttgaagaggccaaaggaatgtccatt

SEQ ID NO: 534 - DNA, 21 bp, Artificial Sequence
  Made in the lab
cccgagacttggccataaaga

SEQ ID NO: 535 - DNA, 22 bp, Artificial Sequence
  Made in the lab
acccgagacttggccataaaga

SEQ ID NO: 536 - DNA, 23 bp, Artificial Sequence
  Made in the lab
aacccgagacttggccataaaga

SEQ ID NO: 537 - DNA, 24 bp, Artificial Sequence
  Made in the lab
gaacccgagacttggccataaaga

SEQ ID NO: 538 - DNA, 25 bp, Artificial Sequence
  Made in the lab
ggaacccgagacttggccataaaga

SEQ ID NO: 539 - DNA, 26 bp, Artificial Sequence
  Made in the lab
tggaacccgagacttggccataaaga

SEQ ID NO: 540 - DNA, 27 bp, Artificial Sequence
  Made in the lab
ctggaacccgagacttggccataaaga

SEQ ID NO: 541 - DNA, 28 bp, Artificial Sequence
  Made in the lab
tctggaacccgagacttggccataaaga

SEQ ID NO: 542 - DNA, 29 bp, Artificial Sequence
  Made in the lab
ttctggaacccgagacttggccataaaga

SEQ ID NO: 543 - DNA, 30 bp, Artificial Sequence
  Made in the lab
tttctggaacccgagacttggccataaaga

SEQ ID NO: 544 - DNA, 21 bp, Artificial Sequence
  Made in the lab
gcggcgaccagggctggattt

SEQ ID NO: 545 - DNA, 22 bp, Artificial Sequence
  Made in the lab
agcggcgaccagggctggattt

SEQ ID NO: 546 - DNA, 23 bp, Artificial Sequence
  Made in the lab
aagcggcgaccagggctggattt

SEQ ID NO: 547 - DNA, 24 bp, Artificial Sequence
  Made in the lab
taagcggcgaccagggctggattt

SEQ ID NO: 548 - DNA, 25 bp, Artificial Sequence
  Made in the lab
ttaagcggcgaccagggctggattt

SEQ ID NO: 549 - DNA, 26 bp, Artificial Sequence
  Made in the lab
attaagcggcgaccagggctggattt

SEQ ID NO: 550 - DNA, 27 bp, Artificial Sequence
  Made in the lab
tattaagcggcgaccagggctggattt

SEQ ID NO: 551 - DNA, 28 bp, Artificial Sequence
  Made in the lab
ctattaagcggcgaccagggctggattt

SEQ ID NO: 552 - DNA, 29 bp, Artificial Sequence
  Made in the lab
gctattaagcggcgaccagggctggattt

SEQ ID NO: 553 - DNA, 30 bp, Artificial Sequence
  Made in the lab
ggctattaagcggcgaccagggctggattt

SEQ ID NO: 554 - DNA, 21 bp, Artificial Sequence
  Made in the lab
gaattccctgatctaactatg

SEQ ID NO: 555 - DNA, 22 bp, Artificial Sequence
  Made in the lab
agaattccctgatctaactatg

SEQ ID NO: 556 - DNA, 23 bp, Artificial Sequence
  Made in the lab
aagaattccctgatctaactatg

SEQ ID NO: 557 - DNA, 24 bp, Artificial Sequence
  Made in the lab
gaagaattccctgatctaactatg

SEQ ID NO: 558 - DNA, 25 bp, Artificial Sequence
  Made in the lab
tgaagaattccctgatctaactatg

SEQ ID NO: 559 - DNA, 26 bp, Artificial Sequence
  Made in the lab
atgaagaattccctgatctaactatg

SEQ ID NO: 560 - DNA, 27 bp, Artificial Sequence
  Made in the lab
aatgaagaattccctgatctaactatg

SEQ ID NO: 561 - DNA, 28 bp, Artificial Sequence
  Made in the lab
caatgaagaattccctgatctaactatg

SEQ ID NO: 562 - DNA, 29 bp, Artificial Sequence
  Made in the lab
acaatgaagaattccctgatctaactatg

SEQ ID NO: 563 - DNA, 30 bp, Artificial Sequence
  Made in the lab
aacaatgaagaattccctgatctaactatg

SEQ ID NO: 564 - DNA, 21 bp, Artificial Sequence
  Made in the lab
gttctagtgagcaacatgttc

SEQ ID NO: 565 - DNA, 22 bp, Artificial Sequence
  Made in the lab
agttctagtgagcaacatgttc

SEQ ID NO: 566 - DNA, 23 bp, Artificial Sequence
  Made in the lab
aagttctagtgagcaacatgttc

SEQ ID NO: 567 - DNA, 24 bp, Artificial Sequence
  Made in the lab
caagttctagtgagcaacatgttc

SEQ ID NO: 568 - DNA, 25 bp, Artificial Sequence
  Made in the lab
tcaagttctagtgagcaacatgttc

SEQ ID NO: 569 - DNA, 26 bp, Artificial Sequence
  Made in the lab
ttcaagttctagtgagcaacatgttc

SEQ ID NO: 570 - DNA, 27 bp, Artificial Sequence
  Made in the lab
gttcaagttctagtgagcaacatgttc

SEQ ID NO: 571 - DNA, 28 bp, Artificial Sequence
  Made in the lab
cgttcaagttctagtgagcaacatgttc

SEQ ID NO: 572 - DNA, 29 bp, Artificial Sequence
  Made in the lab
tcgttcaagttctagtgagcaacatgttc

SEQ ID NO: 573 - DNA, 30 bp, Artificial Sequence
  Made in the lab
atcgttcaagttctagtgagcaacatgttc

SEQ ID NO: 574 - DNA, 21 bp, Artificial Sequence
  Made in the lab
ccaatcgtggatctaactttg

SEQ ID NO: 575 - DNA, 22 bp, Artificial Sequence
  Made in the lab
accaatcgtggatctaactttg

SEQ ID NO: 576 - DNA, 23 bp, Artificial Sequence
  Made in the lab
caccaatcgtggatctaactttg

SEQ ID NO: 577 - DNA, 24 bp, Artificial Sequence
  Made in the lab
tcaccaatcgtggatctaactttg

SEQ ID NO: 578 - DNA, 25 bp, Artificial Sequence
  Made in the lab
ctcaccaatcgtggatctaactttg

SEQ ID NO: 579 - DNA, 26 bp, Artificial Sequence
  Made in the lab
tctcaccaatcgtggatctaactttg

SEQ ID NO: 580 - DNA, 27 bp, Artificial Sequence
  Made in the lab
gtctcaccaatcgtggatctaactttg

SEQ ID NO: 581 - DNA, 28 bp, Artificial Sequence
  Made in the lab
agtctcaccaatcgtggatctaactttg

SEQ ID NO: 582 - DNA, 29 bp, Artificial Sequence
  Made in the lab
tagtctcaccaatcgtggatctaactttg

SEQ ID NO: 583 - DNA, 30 bp, Artificial Sequence
  Made in the lab
ctagtctcaccaatcgtggatctaactttg

SEQ ID NO: 584 - DNA, 21 bp, Artificial Sequence
  Made in the lab
ccagctcctttactttccaga

SEQ ID NO: 585 - DNA, 22 bp, Artificial Sequence
  Made in the lab
accagctcctttactttccaga

SEQ ID NO: 586 - DNA, 23 bp, Artificial Sequence
  Made in the lab
aaccagctcctttactttccaga

SEQ ID NO: 587 - DNA, 24 bp, Artificial Sequence
  Made in the lab
gaaccagctcctttactttccaga

SEQ ID NO: 588 - DNA, 25 bp, Artificial Sequence
  Made in the lab
agaaccagctcctttactttccaga

SEQ ID NO: 589 - DNA, 26 bp, Artificial Sequence
  Made in the lab
gagaaccagctcctttactttccaga

SEQ ID NO: 590 - DNA, 27 bp, Artificial Sequence
  Made in the lab
tgagaaccagctcctttactttccaga

SEQ ID NO: 591 - DNA, 28 bp, Artificial Sequence
  Made in the lab
atgagaaccagctcctttactttccaga

SEQ ID NO: 592 - DNA, 29 bp, Artificial Sequence
  Made in the lab
gatgagaaccagctcctttactttccaga

SEQ ID NO: 593 - DNA, 30 bp, Artificial Sequence
  Made in the lab
ggatgagaaccagctcctttactttccaga

SEQ ID NO: 594 - DNA, 21 bp, Artificial Sequence
  Made in the lab
agataatgctgcatttttctg

SEQ ID NO: 595 - DNA, 22 bp, Artificial Sequence
  Made in the lab
aagataatgctgcatttttctg

SEQ ID NO: 596 - DNA, 23 bp, Artificial Sequence
  Made in the lab
aaagataatgctgcatttttctg

SEQ ID NO: 597 - DNA, 24 bp, Artificial Sequence
  Made in the lab
taaagataatgctgcatttttctg

SEQ ID NO: 598 - DNA, 25 bp, Artificial Sequence
  Made in the lab
ataaagataatgctgcatttttctg

SEQ ID NO: 599 - DNA, 26 bp, Artificial Sequence
  Made in the lab
cataaagataatgctgcatttttctg

SEQ ID NO: 600 - DNA, 27 bp, Artificial Sequence
  Made in the lab
ccataaagataatgctgcatttttctg

SEQ ID NO: 601 - DNA, 28 bp, Artificial Sequence
  Made in the lab
gccataaagataatgctgcatttttctg

SEQ ID NO: 602 - DNA, 29 bp, Artificial Sequence
  Made in the lab
ggccataaagataatgctgcatttttctg

SEQ ID NO: 603 - DNA, 30 bp, Artificial Sequence
  Made in the lab
tggccataaagataatgctgcatttttctg

SEQ ID NO: 604 - DNA, 21 bp, Artificial Sequence
  Made in the lab
gctttacagtggcaaaaataa

SEQ ID NO: 605 - DNA, 22 bp, Artificial Sequence
  Made in the lab
agctttacagtggcaaaaataa

SEQ ID NO: 606 - DNA, 23 bp, Artificial Sequence
  Made in the lab
aagctttacagtggcaaaaataa

SEQ ID NO: 607 - DNA, 24 bp, Artificial Sequence
  Made in the lab
taagctttacagtggcaaaaataa

SEQ ID NO: 608 - DNA, 25 bp, Artificial Sequence
  Made in the lab
ctaagctttacagtggcaaaaataa

SEQ ID NO: 609 - DNA, 26 bp, Artificial Sequence
  Made in the lab
gctaagctttacagtggcaaaaataa

SEQ ID NO: 610 - DNA, 27 bp, Artificial Sequence
  Made in the lab
tgctaagctttacagtggcaaaaataa

SEQ ID NO: 611 - DNA, 28 bp, Artificial Sequence
  Made in the lab
gtgctaagctttacagtggcaaaaataa

SEQ ID NO: 612 - DNA, 29 bp, Artificial Sequence
  Made in the lab
tgtgctaagctttacagtggcaaaaataa

SEQ ID NO: 613 - DNA, 30 bp, Artificial Sequence
  Made in the lab
ctgtgctaagctttacagtggcaaaaataa

SEQ ID NO: 614 - DNA, 21 bp, Artificial Sequence
  Made in the lab
tgacatgtagcaaagattttc

SEQ ID NO: 615 - DNA, 22 bp, Artificial Sequence
  Made in the lab
atgacatgtagcaaagattttc

SEQ ID NO: 616 - DNA, 23 bp, Artificial Sequence
  Made in the lab
aatgacatgtagcaaagattttc

SEQ ID NO: 617 - DNA, 24 bp, Artificial Sequence
  Made in the lab
taatgacatgtagcaaagattttc

SEQ ID NO: 618 - DNA, 25 bp, Artificial Sequence
  Made in the lab
ataatgacatgtagcaaagattttc

SEQ ID NO: 619 - DNA, 26 bp, Artificial Sequence
  Made in the lab
aataatgacatgtagcaaagattttc

SEQ ID NO: 620 - DNA, 27 bp, Artificial Sequence
  Made in the lab
aaataatgacatgtagcaaagattttc

SEQ ID NO: 621 - DNA, 28 bp, Artificial Sequence
  Made in the lab
aaaataatgacatgtagcaaagattttc

SEQ ID NO: 622 - DNA, 29 bp, Artificial Sequence
  Made in the lab
aaaaataatgacatgtagcaaagattttc

SEQ ID NO: 623 - DNA, 30 bp, Artificial Sequence
  Made in the lab
caaaaataatgacatgtagcaaagattttc

SEQ ID NO: 624 - DNA, 21 bp, Artificial Sequence
  Made in the lab
aatttcttgtgttgtgtgatc

SEQ ID NO: 625 - DNA, 22 bp, Artificial Sequence
  Made in the lab
aaatttcttgtgttgtgtgatc

SEQ ID NO: 626 - DNA, 23 bp, Artificial Sequence
  Made in the lab
aaaatttcttgtgttgtgtgatc

SEQ ID NO: 627 - DNA, 24 bp, Artificial Sequence
  Made in the lab
taaaatttcttgtgttgtgtgatc

SEQ ID NO: 628 - DNA, 25 bp, Artificial Sequence
  Made in the lab
gtaaaatttcttgtgttgtgtgatc

SEQ ID NO: 629 - DNA, 26 bp, Artificial Sequence
  Made in the lab
tgtaaaatttcttgtgttgtgtgatc

SEQ ID NO: 630 - DNA, 27 bp, Artificial Sequence
  Made in the lab
ttgtaaaatttcttgtgttgtgtgatc

SEQ ID NO: 631 - DNA, 28 bp, Artificial Sequence
  Made in the lab
tttgtaaaatttcttgtgttgtgtgatc

SEQ ID NO: 632 - DNA, 29 bp, Artificial Sequence
  Made in the lab
ttttgtaaaatttcttgtgttgtgtgatc

SEQ ID NO: 633 - DNA, 30 bp, Artificial Sequence
  Made in the lab
cttttgtaaaatttcttgtgttgtgtgatc

SEQ ID NO: 634 - DNA, 21 bp, Artificial Sequence
  Made in the lab
ccagaggaatctatagtttaa

SEQ ID NO: 635 - DNA, 22 bp, Artificial Sequence
  Made in the lab
accagaggaatctatagtttaa

SEQ ID NO: 636 - DNA, 23 bp, Artificial Sequence
  Made in the lab
aaccagaggaatctatagtttaa

SEQ ID NO: 637 - DNA, 24 bp, Artificial Sequence
  Made in the lab
caaccagaggaatctatagtttaa

SEQ ID NO: 638 - DNA, 25 bp, Artificial Sequence
  Made in the lab
acaaccagaggaatctatagtttaa

SEQ ID NO: 639 - DNA, 26 bp, Artificial Sequence
  Made in the lab
cacaaccagaggaatctatagtttaa

SEQ ID NO: 640 - DNA, 27 bp, Artificial Sequence
  Made in the lab
ccacaaccagaggaatctatagtttaa

SEQ ID NO: 641 - DNA, 28 bp, Artificial Sequence
  Made in the lab
cccacaaccagaggaatctatagtttaa

SEQ ID NO: 642 - DNA, 29 bp, Artificial Sequence
  Made in the lab
acccacaaccagaggaatctatagtttaa

SEQ ID NO: 643 - DNA, 30 bp, Artificial Sequence
  Made in the lab
cacccacaaccagaggaatctatagtttaa

SEQ ID NO: 644 - DNA, 21 bp, Artificial Sequence
  Made in the lab
gggaacagtaaatttttgagg

SEQ ID NO: 645 - DNA, 22 bp, Artificial Sequence
  Made in the lab
agggaacagtaaatttttgagg

SEQ ID NO: 646 - DNA, 23 bp, Artificial Sequence
  Made in the lab
aagggaacagtaaatttttgagg

SEQ ID NO: 647 - DNA, 24 bp, Artificial Sequence
  Made in the lab
gaagggaacagtaaatttttgagg

SEQ ID NO: 648 - DNA, 25 bp, Artificial Sequence
  Made in the lab
agaagggaacagtaaatttttgagg

SEQ ID NO: 649 - DNA, 26 bp, Artificial Sequence
  Made in the lab
gagaagggaacagtaaatttttgagg

SEQ ID NO: 650 - DNA, 27 bp, Artificial Sequence
  Made in the lab
ggagaagggaacagtaaatttttgagg

SEQ ID NO: 651 - DNA, 28 bp, Artificial Sequence
  Made in the lab
tggagaagggaacagtaaatttttgagg

SEQ ID NO: 652 - DNA, 29 bp, Artificial Sequence
  Made in the lab
atggagaagggaacagtaaatttttgagg

SEQ ID NO: 653 - DNA, 30 bp, Artificial Sequence
  Made in the lab
gatggagaagggaacagtaaatttttgagg

SEQ ID NO: 654 - DNA, 21 bp, Artificial Sequence
  Made in the lab
tgtttgtcaaccaacagagtt

SEQ ID NO: 655 - DNA, 22 bp, Artificial Sequence
  Made in the lab
atgtttgtcaaccaacagagtt

SEQ ID NO: 656 - DNA, 23 bp, Artificial Sequence
  Made in the lab
aatgtttgtcaaccaacagagtt

SEQ ID NO: 657 - DNA, 24 bp, Artificial Sequence
  Made in the lab
taatgtttgtcaaccaacagagtt

SEQ ID NO: 658 - DNA, 25 bp, Artificial Sequence
  Made in the lab
gtaatgtttgtcaaccaacagagtt

SEQ ID NO: 659 - DNA, 26 bp, Artificial Sequence
  Made in the lab
agtaatgtttgtcaaccaacagagtt

SEQ ID NO: 660 - DNA, 27 bp, Artificial Sequence
  Made in the lab
gagtaatgtttgtcaaccaacagagtt

SEQ ID NO: 661 - DNA, 28 bp, Artificial Sequence
  Made in the lab
tgagtaatgtttgtcaaccaacagagtt

SEQ ID NO: 662 - DNA, 29 bp, Artificial Sequence
  Made in the lab
atgagtaatgtttgtcaaccaacagagtt

SEQ ID NO: 663 - DNA, 30 bp, Artificial Sequence
  Made in the lab
catgagtaatgtttgtcaaccaacagagtt

SEQ ID NO: 664 - DNA, 21 bp, Artificial Sequence
  Made in the lab
cattgagggtatcttcacttt

SEQ ID NO: 665 - DNA, 22 bp, Artificial Sequence
  Made in the lab
acattgagggtatcttcacttt

SEQ ID NO: 666 - DNA, 23 bp, Artificial Sequence
  Made in the lab
aacattgagggtatcttcacttt

SEQ ID NO: 667 - DNA, 24 bp, Artificial Sequence
  Made in the lab
caacattgagggtatcttcacttt

SEQ ID NO: 668 - DNA, 25 bp, Artificial Sequence
  Made in the lab
acaacattgagggtatcttcacttt

SEQ ID NO: 669 - DNA, 26 bp, Artificial Sequence
  Made in the lab
cacaacattgagggtatcttcacttt

SEQ ID NO: 670 - DNA, 27 bp, Artificial Sequence
  Made in the lab
acacaacattgagggtatcttcacttt

SEQ ID NO: 671 - DNA, 28 bp, Artificial Sequence
  Made in the lab
gacacaacattgagggtatcttcacttt

SEQ ID NO: 672 - DNA, 29 bp, Artificial Sequence
  Made in the lab
cgacacaacattgagggtatcttcacttt

SEQ ID NO: 673 - DNA, 30 bp, Artificial Sequence
  Made in the lab
ccgacacaacattgagggtatcttcacttt

SEQ ID NO: 674 - DNA, 21 bp, Artificial Sequence
  Made in the lab
agagtcctaaggagttaaatc

SEQ ID NO: 675 - DNA, 22 bp, Artificial Sequence
  Made in the lab
aagagtcctaaggagttaaatc

SEQ ID NO: 676 - DNA, 23 bp, Artificial Sequence
  Made in the lab
aaagagtcctaaggagttaaatc

SEQ ID NO: 677 - DNA, 24 bp, Artificial Sequence
  Made in the lab
caaagagtcctaaggagttaaatc

SEQ ID NO: 678 - DNA, 25 bp, Artificial Sequence
  Made in the lab
tcaaagagtcctaaggagttaaatc

SEQ ID NO: 679 - DNA, 26 bp, Artificial Sequence
  Made in the lab
ttcaaagagtcctaaggagttaaatc

SEQ ID NO: 680 - DNA, 27 bp, Artificial Sequence
  Made in the lab
tttcaaagagtcctaaggagttaaatc

SEQ ID NO: 681 - DNA, 28 bp, Artificial Sequence
  Made in the lab
ttttcaaagagtcctaaggagttaaatc

SEQ ID NO: 682 - DNA, 29 bp, Artificial Sequence
  Made in the lab
cttttcaaagagtcctaaggagttaaatc

SEQ ID NO: 683 - DNA, 30 bp, Artificial Sequence
  Made in the lab
acttttcaaagagtcctaaggagttaaatc

SEQ ID NO: 684 - DNA, 21 bp, Artificial Sequence
  Made in the lab
gctccagacatacaaacataa

SEQ ID NO: 685 - DNA, 22 bp, Artificial Sequence
  Made in the lab
agctccagacatacaaacataa

SEQ ID NO: 686 - DNA, 23 bp, Artificial Sequence
  Made in the lab
aagctccagacatacaaacataa

SEQ ID NO: 687 - DNA, 24 bp, Artificial Sequence
  Made in the lab
taagctccagacatacaaacataa

SEQ ID NO: 688 - DNA, 25 bp, Artificial Sequence
  Made in the lab
ttaagctccagacatacaaacataa

SEQ ID NO: 689 - DNA, 26 bp, Artificial Sequence
  Made in the lab
tttaagctccagacatacaaacataa

SEQ ID NO: 690 - DNA, 27 bp, Artificial Sequence
  Made in the lab
gtttaagctccagacatacaaacataa

SEQ ID NO: 691 - DNA, 28 bp, Artificial Sequence
  Made in the lab
agtttaagctccagacatacaaacataa

SEQ ID NO: 692 - DNA, 29 bp, Artificial Sequence
  Made in the lab
tagtttaagctccagacatacaaacataa

SEQ ID NO: 693 - DNA, 30 bp, Artificial Sequence
  Made in the lab
atagtttaagctccagacatacaaacataa

SEQ ID NO: 694 - DNA, 21 bp, Artificial Sequence
  Made in the lab
tcatagggttctgatcacatt

SEQ ID NO: 695 - DNA, 22 bp, Artificial Sequence
  Made in the lab
atcatagggttctgatcacatt

SEQ ID NO: 696 - DNA, 23 bp, Artificial Sequence
  Made in the lab
aatcatagggttctgatcacatt

SEQ ID NO: 697 - DNA, 24 bp, Artificial Sequence
  Made in the lab
aaatcatagggttctgatcacatt

SEQ ID NO: 698 - DNA, 25 bp, Artificial Sequence
  Made in the lab
gaaatcatagggttctgatcacatt

SEQ ID NO: 699 - DNA, 26 bp, Artificial Sequence
  Made in the lab
agaaatcatagggttctgatcacatt

SEQ ID NO: 700 - DNA, 27 bp, Artificial Sequence
  Made in the lab
cagaaatcatagggttctgatcacatt

SEQ ID NO: 701 - DNA, 28 bp, Artificial Sequence
  Made in the lab
tcagaaatcatagggttctgatcacatt

SEQ ID NO: 702 - DNA, 29 bp, Artificial Sequence
  Made in the lab
atcagaaatcatagggttctgatcacatt

SEQ ID NO: 703 - DNA, 30 bp, Artificial Sequence
  Made in the lab
aatcagaaatcatagggttctgatcacatt

SEQ ID NO: 704 - DNA, 21 bp, Artificial Sequence
  Made in the lab
ccagacaagctaaccatctta

SEQ ID NO: 705 - DNA, 22 bp, Artificial Sequence
  Made in the lab
accagacaagctaaccatctta

SEQ ID NO: 706 - DNA, 23 bp, Artificial Sequence
  Made in the lab
aaccagacaagctaaccatctta

SEQ ID NO: 707 - DNA, 24 bp, Artificial Sequence
  Made in the lab
aaaccagacaagctaaccatctta

SEQ ID NO: 708 - DNA, 25 bp, Artificial Sequence
  Made in the lab
aaaaccagacaagctaaccatctta

SEQ ID NO: 709 - DNA, 26 bp, Artificial Sequence
  Made in the lab
gaaaaccagacaagctaaccatctta

SEQ ID NO: 710 - DNA, 27 bp, Artificial Sequence
  Made in the lab
cgaaaaccagacaagctaaccatctta

SEQ ID NO: 711 - DNA, 28 bp, Artificial Sequence
  Made in the lab
tcgaaaaccagacaagctaaccatctta

SEQ ID NO: 712 - DNA, 29 bp, Artificial Sequence
  Made in the lab
ctcgaaaaccagacaagctaaccatctta

SEQ ID NO: 713 - DNA, 30 bp, Artificial Sequence
  Made in the lab
gctcgaaaaccagacaagctaaccatctta

SEQ ID NO: 714 - DNA, 21 bp, Artificial Sequence
  Made in the lab
cagcaaacagaattggacatg

SEQ ID NO: 715 - DNA, 22 bp, Artificial Sequence
  Made in the lab
acagcaaacagaattggacatg

SEQ ID NO: 716 - DNA, 23 bp, Artificial Sequence
  Made in the lab
aacagcaaacagaattggacatg

SEQ ID NO: 717 - DNA, 24 bp, Artificial Sequence
  Made in the lab
caacagcaaacagaattggacatg

SEQ ID NO: 718 - DNA, 25 bp, Artificial Sequence
  Made in the lab
gcaacagcaaacagaattggacatg

SEQ ID NO: 719 - DNA, 26 bp, Artificial Sequence
  Made in the lab
agcaacagcaaacagaattggacatg

SEQ ID NO: 720 - DNA, 27 bp, Artificial Sequence
  Made in the lab
cagcaacagcaaacagaattggacatg

SEQ ID NO: 721 - DNA, 28 bp, Artificial Sequence
  Made in the lab
gcagcaacagcaaacagaattggacatg

SEQ ID NO: 722 - DNA, 29 bp, Artificial Sequence
  Made in the lab
agcagcaacagcaaacagaattggacatg

SEQ ID NO: 723 - DNA, 30 bp, Artificial Sequence
  Made in the lab
cagcagcaacagcaaacagaattggacatg

SEQ ID NO: 724 - DNA, 21 bp, Artificial Sequence
  Made in the lab
gaacctgacatccactgtttg

SEQ ID NO: 725 - DNA, 22 bp, Artificial Sequence
  Made in the lab
agaacctgacatccactgtttg

SEQ ID NO: 726 - DNA, 23 bp, Artificial Sequence
  Made in the lab
aagaacctgacatccactgtttg

SEQ ID NO: 727 - DNA, 24 bp, Artificial Sequence
  Made in the lab
gaagaacctgacatccactgtttg

SEQ ID NO: 728 - DNA, 25 bp, Artificial Sequence
  Made in the lab
agaagaacctgacatccactgtttg

SEQ ID NO: 729 - DNA, 26 bp, Artificial Sequence
  Made in the lab
tagaagaacctgacatccactgtttg

SEQ ID NO: 730 - DNA, 27 bp, Artificial Sequence
  Made in the lab
ttagaagaacctgacatccactgtttg

SEQ ID NO: 731 - DNA, 28 bp, Artificial Sequence
  Made in the lab
gttagaagaacctgacatccactgtttg

SEQ ID NO: 732 - DNA, 29 bp, Artificial Sequence
  Made in the lab
ggttagaagaacctgacatccactgtttg

SEQ ID NO: 733 - DNA, 30 bp, Artificial Sequence
  Made in the lab
aggttagaagaacctgacatccactgtttg

SEQ ID NO: 734 - DNA, 21 bp, Artificial Sequence
  Made in the lab
ctctggacctggaattcaagg

SEQ ID NO: 735 - DNA, 22 bp, Artificial Sequence
  Made in the lab
actctggacctggaattcaagg

SEQ ID NO: 736 - DNA, 23 bp, Artificial Sequence
  Made in the lab
aactctggacctggaattcaagg

SEQ ID NO: 737 - DNA, 24 bp, Artificial Sequence
  Made in the lab
aaactctggacctggaattcaagg

SEQ ID NO: 738 - DNA, 25 bp, Artificial Sequence
  Made in the lab
gaaactctggacctggaattcaagg

SEQ ID NO: 739 - DNA, 26 bp, Artificial Sequence
  Made in the lab
ggaaactctggacctggaattcaagg

SEQ ID NO: 740 - DNA, 27 bp, Artificial Sequence
  Made in the lab
tggaaactctggacctggaattcaagg

SEQ ID NO: 741 - DNA, 28 bp, Artificial Sequence
  Made in the lab
ctggaaactctggacctggaattcaagg

SEQ ID NO: 742 - DNA, 29 bp, Artificial Sequence
  Made in the lab
tctggaaactctggacctggaattcaagg

SEQ ID NO: 743 - DNA, 30 bp, Artificial Sequence
  Made in the lab
ctctggaaactctggacctggaattcaagg

SEQ ID NO: 744 - DNA, 21 bp, Artificial Sequence
  Made in the lab
ctggcaacacatccactgatg

SEQ ID NO: 745 - DNA, 22 bp, Artificial Sequence
  Made in the lab
actggcaacacatccactgatg

SEQ ID NO: 746 - DNA, 23 bp, Artificial Sequence
  Made in the lab
aactggcaacacatccactgatg

SEQ ID NO: 747 - DNA, 24 bp, Artificial Sequence
  Made in the lab
gaactggcaacacatccactgatg

SEQ ID NO: 748 - DNA, 25 bp, Artificial Sequence
  Made in the lab
ggaactggcaacacatccactgatg

SEQ ID NO: 749 - DNA, 26 bp, Artificial Sequence
  Made in the lab
gggaactggcaacacatccactgatg

SEQ ID NO: 750 - DNA, 27 bp, Artificial Sequence
  Made in the lab
ggggaactggcaacacatccactgatg

SEQ ID NO: 751 - DNA, 28 bp, Artificial Sequence
  Made in the lab
cggggaactggcaacacatccactgatg

SEQ ID NO: 752 - DNA, 29 bp, Artificial Sequence
  Made in the lab
gcggggaactggcaacacatccactgatg

SEQ ID NO: 753 - DNA, 30 bp, Artificial Sequence
  Made in the lab
tgcggggaactggcaacacatccactgatg

SEQ ID NO: 754 - DNA, 21 bp, Artificial Sequence
  Made in the lab
ccagccacagtctgaatggtt

SEQ ID NO: 755 - DNA, 22 bp, Artificial Sequence
  Made in the lab
accagccacagtctgaatggtt

SEQ ID NO: 756 - DNA, 23 bp, Artificial Sequence
  Made in the lab
aaccagccacagtctgaatggtt

SEQ ID NO: 757 - DNA, 24 bp, Artificial Sequence
  Made in the lab
gaaccagccacagtctgaatggtt

SEQ ID NO: 758 - DNA, 25 bp, Artificial Sequence
  Made in the lab
tgaaccagccacagtctgaatggtt

SEQ ID NO: 759 - DNA, 26 bp, Artificial Sequence
  Made in the lab
ttgaaccagccacagtctgaatggtt

SEQ ID NO: 760 - DNA, 27 bp, Artificial Sequence
  Made in the lab
tttgaaccagccacagtctgaatggtt

SEQ ID NO: 761 - DNA, 28 bp, Artificial Sequence
  Made in the lab
ttttgaaccagccacagtctgaatggtt

SEQ ID NO: 762 - DNA, 29 bp, Artificial Sequence
  Made in the lab
gttttgaaccagccacagtctgaatggtt

SEQ ID NO: 763 - DNA, 30 bp, Artificial Sequence
  Made in the lab
tgttttgaaccagccacagtctgaatggtt

SEQ ID NO: 764 - DNA, 21 bp, Artificial Sequence
  Made in the lab
gaatggctctggatgagaacc

SEQ ID NO: 765 - DNA, 22 bp, Artificial Sequence
  Made in the lab
agaatggctctggatgagaacc

SEQ ID NO: 766 - DNA, 23 bp, Artificial Sequence
  Made in the lab
aagaatggctctggatgagaacc

SEQ ID NO: 767 - DNA, 24 bp, Artificial Sequence
  Made in the lab
caagaatggctctggatgagaacc

SEQ ID NO: 768 - DNA, 25 bp, Artificial Sequence
  Made in the lab
ccaagaatggctctggatgagaacc

SEQ ID NO: 769 - DNA, 26 bp, Artificial Sequence
  Made in the lab
accaagaatggctctggatgagaacc

SEQ ID NO: 770 - DNA, 27 bp, Artificial Sequence
  Made in the lab
aaccaagaatggctctggatgagaacc

SEQ ID NO: 771 - DNA, 28 bp, Artificial Sequence
  Made in the lab
gaaccaagaatggctctggatgagaacc

SEQ ID NO: 772 - DNA, 29 bp, Artificial Sequence
  Made in the lab
agaaccaagaatggctctggatgagaacc

SEQ ID NO: 773 - DNA, 30 bp, Artificial Sequence
  Made in the lab
aagaaccaagaatggctctggatgagaacc

SEQ ID NO: 774 - DNA, 21 bp, Artificial Sequence
  Made in the lab
ccattgtccagccatcagctt

SEQ ID NO: 775 - DNA, 22 bp, Artificial Sequence
  Made in the lab
accattgtccagccatcagctt

SEQ ID NO: 776 - DNA, 23 bp, Artificial Sequence
  Made in the lab
aaccattgtccagccatcagctt

SEQ ID NO: 777 - DNA, 24 bp, Artificial Sequence
  Made in the lab
taaccattgtccagccatcagctt

SEQ ID NO: 778 - DNA, 25 bp, Artificial Sequence
  Made in the lab
gtaaccattgtccagccatcagctt

SEQ ID NO: 779 - DNA, 26 bp, Artificial Sequence
  Made in the lab
tgtaaccattgtccagccatcagctt

SEQ ID NO: 780 - DNA, 27 bp, Artificial Sequence
  Made in the lab
ctgtaaccattgtccagccatcagctt

SEQ ID NO: 781 - DNA, 28 bp, Artificial Sequence
  Made in the lab
cctgtaaccattgtccagccatcagctt

SEQ ID NO: 782 - DNA, 29 bp, Artificial Sequence
  Made in the lab
tcctgtaaccattgtccagccatcagctt

SEQ ID NO: 783 - DNA, 30 bp, Artificial Sequence
  Made in the lab
ctcctgtaaccattgtccagccatcagctt

SEQ ID NO: 784 - DNA, 21 bp, Artificial Sequence
  Made in the lab
ggccaagtgctgtctgtcatg

SEQ ID NO: 785 - DNA, 22 bp, Artificial Sequence
  Made in the lab
aggccaagtgctgtctgtcatg

SEQ ID NO: 786 - DNA, 23 bp, Artificial Sequence
  Made in the lab
aaggccaagtgctgtctgtcatg

SEQ ID NO: 787 - DNA, 24 bp, Artificial Sequence
  Made in the lab
aaaggccaagtgctgtctgtcatg

SEQ ID NO: 788 - DNA, 25 bp, Artificial Sequence
  Made in the lab
aaaaggccaagtgctgtctgtcatg

SEQ ID NO: 789 - DNA, 26 bp, Artificial Sequence
  Made in the lab
taaaaggccaagtgctgtctgtcatg

SEQ ID NO: 790 - DNA, 27 bp, Artificial Sequence
  Made in the lab
ttaaaaggccaagtgctgtctgtcatg

SEQ ID NO: 791 - DNA, 28 bp, Artificial Sequence
  Made in the lab
attaaaaggccaagtgctgtctgtcatg

SEQ ID NO: 792 - DNA, 29 bp, Artificial Sequence
  Made in the lab
aattaaaaggccaagtgctgtctgtcatg

SEQ ID NO: 793 - DNA, 30 bp, Artificial Sequence
  Made in the lab
aaattaaaaggccaagtgctgtctgtcatg

SEQ ID NO: 794 - DNA, 21 bp, Artificial Sequence
  Made in the lab
ccactagggcacatctggatg

SEQ ID NO: 795 - DNA, 22 bp, Artificial Sequence
  Made in the lab
accactagggcacatctggatg

SEQ ID NO: 796 - DNA, 23 bp, Artificial Sequence
  Made in the lab
aaccactagggcacatctggatg

SEQ ID NO: 797 - DNA, 24 bp, Artificial Sequence
  Made in the lab
aaaccactagggcacatctggatg

SEQ ID NO: 798 - DNA, 25 bp, Artificial Sequence
  Made in the lab
aaaaccactagggcacatctggatg

SEQ ID NO: 799 - DNA, 26 bp, Artificial Sequence
  Made in the lab
gaaaaccactagggcacatctggatg

SEQ ID NO: 800 - DNA, 27 bp, Artificial Sequence
  Made in the lab
tgaaaaccactagggcacatctggatg

SEQ ID NO: 801 - DNA, 28 bp, Artificial Sequence
  Made in the lab
ttgaaaaccactagggcacatctggatg

SEQ ID NO: 802 - DNA, 29 bp, Artificial Sequence
  Made in the lab
cttgaaaaccactagggcacatctggatg

SEQ ID NO: 803 - DNA, 30 bp, Artificial Sequence
  Made in the lab
acttgaaaaccactagggcacatctggatg

SEQ ID NO: 804 - DNA, 21 bp, Artificial Sequence
  Made in the lab
cggcggcgacggaacaagatg

SEQ ID NO: 805 - DNA, 22 bp, Artificial Sequence
  Made in the lab
acggcggcgacggaacaagatg

SEQ ID NO: 806 - DNA, 23 bp, Artificial Sequence
  Made in the lab
aacggcggcgacggaacaagatg

SEQ ID NO: 807 - DNA, 24 bp, Artificial Sequence
  Made in the lab
gaacggcggcgacggaacaagatg

SEQ ID NO: 808 - DNA, 25 bp, Artificial Sequence
  Made in the lab
tgaacggcggcgacggaacaagatg

SEQ ID NO: 809 - DNA, 26 bp, Artificial Sequence
  Made in the lab
ttgaacggcggcgacggaacaagatg

SEQ ID NO: 810 - DNA, 27 bp, Artificial Sequence
  Made in the lab
attgaacggcggcgacggaacaagatg

SEQ ID NO: 811 - DNA, 28 bp, Artificial Sequence
  Made in the lab
aattgaacggcggcgacggaacaagatg

SEQ ID NO: 812 - DNA, 29 bp, Artificial Sequence
  Made in the lab
aaattgaacggcggcgacggaacaagatg

SEQ ID NO: 813 - DNA, 30 bp, Artificial Sequence
  Made in the lab
gaaattgaacggcggcgacggaacaagatg

SEQ ID NO: 814 - DNA, 21 bp, Artificial Sequence
  Made in the lab
cctggccagcctgaggtcttc

SEQ ID NO: 815 - DNA, 22 bp, Artificial Sequence
  Made in the lab
acctggccagcctgaggtcttc

SEQ ID NO: 816 - DNA, 23 bp, Artificial Sequence
  Made in the lab
aacctggccagcctgaggtcttc

SEQ ID NO: 817 - DNA, 24 bp, Artificial Sequence
  Made in the lab
caacctggccagcctgaggtcttc

SEQ ID NO: 818 - DNA, 25 bp, Artificial Sequence
  Made in the lab
gcaacctggccagcctgaggtcttc

SEQ ID NO: 819 - DNA, 26 bp, Artificial Sequence
  Made in the lab
agcaacctggccagcctgaggtcttc

SEQ ID NO: 820 - DNA, 27 bp, Artificial Sequence
  Made in the lab
cagcaacctggccagcctgaggtcttc

SEQ ID NO: 821 - DNA, 28 bp, Artificial Sequence
  Made in the lab
acagcaacctggccagcctgaggtcttc

SEQ ID NO: 822 - DNA, 29 bp, Artificial Sequence
  Made in the lab
cacagcaacctggccagcctgaggtcttc

SEQ ID NO: 823 - DNA, 30 bp, Artificial Sequence
  Made in the lab
gcacagcaacctggccagcctgaggtcttc

SEQ ID NO: 824 - DNA, 21 bp, Artificial Sequence
  Made in the lab
gccacattgttgcatgaaact

SEQ ID NO: 825 - DNA, 22 bp, Artificial Sequence
  Made in the lab
agccacattgttgcatgaaact

SEQ ID NO: 826 - DNA, 23 bp, Artificial Sequence
  Made in the lab
aagccacattgttgcatgaaact

SEQ ID NO: 827 - DNA, 24 bp, Artificial Sequence
  Made in the lab
taagccacattgttgcatgaaact

SEQ ID NO: 828 - DNA, 25 bp, Artificial Sequence
  Made in the lab
ataagccacattgttgcatgaaact

SEQ ID NO: 829 - DNA, 26 bp, Artificial Sequence
  Made in the lab
aataagccacattgttgcatgaaact

SEQ ID NO: 830 - DNA, 27 bp, Artificial Sequence
  Made in the lab
caataagccacattgttgcatgaaact

SEQ ID NO: 831 - DNA, 28 bp, Artificial Sequence
  Made in the lab
tcaataagccacattgttgcatgaaact

SEQ ID NO: 832 - DNA, 29 bp, Artificial Sequence
  Made in the lab
ctcaataagccacattgttgcatgaaact

SEQ ID NO: 833 - DNA, 30 bp, Artificial Sequence
  Made in the lab
cctcaataagccacattgttgcatgaaact

SEQ ID NO: 834 - DNA, 21 bp, Artificial Sequence
  Made in the lab
ctgtgagattggtctcattgt

SEQ ID NO: 835 - DNA, 22 bp, Artificial Sequence
  Made in the lab
actgtgagattggtctcattgt

SEQ ID NO: 836 - DNA, 23 bp, Artificial Sequence
  Made in the lab
aactgtgagattggtctcattgt

SEQ ID NO: 837 - DNA, 24 bp, Artificial Sequence
  Made in the lab
caactgtgagattggtctcattgt

SEQ ID NO: 838 - DNA, 25 bp, Artificial Sequence
  Made in the lab
acaactgtgagattggtctcattgt

SEQ ID NO: 839 - DNA, 26 bp, Artificial Sequence
  Made in the lab
cacaactgtgagattggtctcattgt

SEQ ID NO: 840 - DNA, 27 bp, Artificial Sequence
  Made in the lab
ccacaactgtgagattggtctcattgt

SEQ ID NO: 841 - DNA, 28 bp, Artificial Sequence
  Made in the lab
accacaactgtgagattggtctcattgt

SEQ ID NO: 842 - DNA, 29 bp, Artificial Sequence
  Made in the lab
gaccacaactgtgagattggtctcattgt

SEQ ID NO: 843 - DNA, 30 bp, Artificial Sequence
  Made in the lab
tgaccacaactgtgagattggtctcattgt

SEQ ID NO: 844 - DNA, 21 bp, Artificial Sequence
  Made in the lab
cgacattcgcactgagtttga

SEQ ID NO: 845 - DNA, 22 bp, Artificial Sequence
  Made in the lab
acgacattcgcactgagtttga

SEQ ID NO: 846 - DNA, 23 bp, Artificial Sequence
  Made in the lab
aacgacattcgcactgagtttga

SEQ ID NO: 847 - DNA, 24 bp, Artificial Sequence
  Made in the lab
caacgacattcgcactgagtttga

SEQ ID NO: 848 - DNA, 25 bp, Artificial Sequence
  Made in the lab
tcaacgacattcgcactgagtttga

SEQ ID NO: 849 - DNA, 26 bp, Artificial Sequence
  Made in the lab
ctcaacgacattcgcactgagtttga

SEQ ID NO: 850 - DNA, 27 bp, Artificial Sequence
  Made in the lab
gctcaacgacattcgcactgagtttga

SEQ ID NO: 851 - DNA, 28 bp, Artificial Sequence
  Made in the lab
cgctcaacgacattcgcactgagtttga

SEQ ID NO: 852 - DNA, 29 bp, Artificial Sequence
  Made in the lab
tcgctcaacgacattcgcactgagtttga

SEQ ID NO: 853 - DNA, 30 bp, Artificial Sequence
  Made in the lab
ctcgctcaacgacattcgcactgagtttga

SEQ ID NO: 854 - DNA, 21 bp, Artificial Sequence
  Made in the lab
taggtaagaactaggatgctt

SEQ ID NO: 855 - DNA, 22 bp, Artificial Sequence
  Made in the lab
ataggtaagaactaggatgctt

SEQ ID NO: 856 - DNA, 23 bp, Artificial Sequence
  Made in the lab
aataggtaagaactaggatgctt

SEQ ID NO: 857 - DNA, 24 bp, Artificial Sequence
  Made in the lab
caataggtaagaactaggatgctt

SEQ ID NO: 858 - DNA, 25 bp, Artificial Sequence
  Made in the lab
acaataggtaagaactaggatgctt

SEQ ID NO: 859 - DNA, 26 bp, Artificial Sequence
  Made in the lab
tacaataggtaagaactaggatgctt

SEQ ID NO: 860 - DNA, 27 bp, Artificial Sequence
  Made in the lab
ctacaataggtaagaactaggatgctt

SEQ ID NO: 861 - DNA, 28 bp, Artificial Sequence
  Made in the lab
gctacaataggtaagaactaggatgctt

SEQ ID NO: 862 - DNA, 29 bp, Artificial Sequence
  Made in the lab
tgctacaataggtaagaactaggatgctt

SEQ ID NO: 863 - DNA, 30 bp, Artificial Sequence
  Made in the lab
gtgctacaataggtaagaactaggatgctt

SEQ ID NO: 864 - DNA, 21 bp, Artificial Sequence
  Made in the lab
actcacatcctatcagtggtt

SEQ ID NO: 865 - DNA, 22 bp, Artificial Sequence
  Made in the lab
aactcacatcctatcagtggtt

SEQ ID NO: 866 - DNA, 23 bp, Artificial Sequence
  Made in the lab
aaactcacatcctatcagtggtt

SEQ ID NO: 867 - DNA, 24 bp, Artificial Sequence
  Made in the lab
gaaactcacatcctatcagtggtt

SEQ ID NO: 868 - DNA, 25 bp, Artificial Sequence
  Made in the lab
tgaaactcacatcctatcagtggtt

SEQ ID NO: 869 - DNA, 26 bp, Artificial Sequence
  Made in the lab
gtgaaactcacatcctatcagtggtt

SEQ ID NO: 870 - DNA, 27 bp, Artificial Sequence
  Made in the lab
agtgaaactcacatcctatcagtggtt

SEQ ID NO: 871 - DNA, 28 bp, Artificial Sequence
  Made in the lab
tagtgaaactcacatcctatcagtggtt

SEQ ID NO: 872 - DNA, 29 bp, Artificial Sequence
  Made in the lab
ttagtgaaactcacatcctatcagtggtt

SEQ ID NO: 873 - DNA, 30 bp, Artificial Sequence
  Made in the lab
gttagtgaaactcacatcctatcagtggtt

SEQ ID NO: 874 - DNA, 21 bp, Artificial Sequence
  Made in the lab
actcctcctcagtagaacatg

SEQ ID NO: 875 - DNA, 22 bp, Artificial Sequence
  Made in the lab
aactcctcctcagtagaacatg

SEQ ID NO: 876 - DNA, 23 bp, Artificial Sequence
  Made in the lab
aaactcctcctcagtagaacatg

SEQ ID NO: 877 - DNA, 24 bp, Artificial Sequence
  Made in the lab
aaaactcctcctcagtagaacatg

SEQ ID NO: 878 - DNA, 25 bp, Artificial Sequence
  Made in the lab
aaaaactcctcctcagtagaacatg

SEQ ID NO: 879 - DNA, 26 bp, Artificial Sequence
  Made in the lab
gaaaaactcctcctcagtagaacatg

SEQ ID NO: 880 - DNA, 27 bp, Artificial Sequence
  Made in the lab
tgaaaaactcctcctcagtagaacatg

SEQ ID NO: 881 - DNA, 28 bp, Artificial Sequence
  Made in the lab
ttgaaaaactcctcctcagtagaacatg

SEQ ID NO: 882 - DNA, 29 bp, Artificial Sequence
  Made in the lab
tttgaaaaactcctcctcagtagaacatg

SEQ ID NO: 883 - DNA, 30 bp, Artificial Sequence
  Made in the lab
gtttgaaaaactcctcctcagtagaacatg

SEQ ID NO: 884 - DNA, 21 bp, Artificial Sequence
  Made in the lab
ctgaggcgccttctagcagtt

SEQ ID NO: 885 - DNA, 22 bp, Artificial Sequence
  Made in the lab
actgaggcgccttctagcagtt

SEQ ID NO: 886 - DNA, 23 bp, Artificial Sequence
  Made in the lab
aactgaggcgccttctagcagtt

SEQ ID NO: 887 - DNA, 24 bp, Artificial Sequence
  Made in the lab
gaactgaggcgccttctagcagtt

SEQ ID NO: 888 - DNA, 25 bp, Artificial Sequence
  Made in the lab
agaactgaggcgccttctagcagtt

SEQ ID NO: 889 - DNA, 26 bp, Artificial Sequence
  Made in the lab
gagaactgaggcgccttctagcagtt

SEQ ID NO: 890 - DNA, 27 bp, Artificial Sequence
  Made in the lab
agagaactgaggcgccttctagcagtt

SEQ ID NO: 891 - DNA, 28 bp, Artificial Sequence
  Made in the lab
gagagaactgaggcgccttctagcagtt

SEQ ID NO: 892 - DNA, 29 bp, Artificial Sequence
  Made in the lab
ggagagaactgaggcgccttctagcagtt

SEQ ID NO: 893 - DNA, 30 bp, Artificial Sequence
  Made in the lab
aggagagaactgaggcgccttctagcagtt

SEQ ID NO: 894 - DNA, 21 bp, Artificial Sequence
  Made in the lab
cacggagagttcctggctctg

SEQ ID NO: 895 - DNA, 22 bp, Artificial Sequence
  Made in the lab
acacggagagttcctggctctg

SEQ ID NO: 896 - DNA, 23 bp, Artificial Sequence
  Made in the lab
aacacggagagttcctggctctg

SEQ ID NO: 897 - DNA, 24 bp, Artificial Sequence
  Made in the lab
gaacacggagagttcctggctctg

SEQ ID NO: 898 - DNA, 25 bp, Artificial Sequence
  Made in the lab
agaacacggagagttcctggctctg

SEQ ID NO: 899 - DNA, 26 bp, Artificial Sequence
  Made in the lab
cagaacacggagagttcctggctctg

SEQ ID NO: 900 - DNA, 27 bp, Artificial Sequence
  Made in the lab
acagaacacggagagttcctggctctg

SEQ ID NO: 901 - DNA, 28 bp, Artificial Sequence
  Made in the lab
gacagaacacggagagttcctggctctg

SEQ ID NO: 902 - DNA, 29 bp, Artificial Sequence
  Made in the lab
ggacagaacacggagagttcctggctctg

SEQ ID NO: 903 - DNA, 30 bp, Artificial Sequence
  Made in the lab
gggacagaacacggagagttcctggctctg

SEQ ID NO: 904 - DNA, 21 bp, Artificial Sequence
  Made in the lab
gcgaatagggccttaaagtag

SEQ ID NO: 905 - DNA, 22 bp, Artificial Sequence
  Made in the lab
agcgaatagggccttaaagtag

SEQ ID NO: 906 - DNA, 23 bp, Artificial Sequence
  Made in the lab
aagcgaatagggccttaaagtag

SEQ ID NO: 907 - DNA, 24 bp, Artificial Sequence
  Made in the lab
caagcgaatagggccttaaagtag

SEQ ID NO: 908 - DNA, 25 bp, Artificial Sequence
  Made in the lab
gcaagcgaatagggccttaaagtag

SEQ ID NO: 909 - DNA, 26 bp, Artificial Sequence
  Made in the lab
ggcaagcgaatagggccttaaagtag

SEQ ID NO: 910 - DNA, 27 bp, Artificial Sequence
  Made in the lab
gggcaagcgaatagggccttaaagtag

SEQ ID NO: 911 - DNA, 28 bp, Artificial Sequence
  Made in the lab
ggggcaagcgaatagggccttaaagtag

SEQ ID NO: 912 - DNA, 29 bp, Artificial Sequence
  Made in the lab
tggggcaagcgaatagggccttaaagtag

SEQ ID NO: 913 - DNA, 30 bp, Artificial Sequence
  Made in the lab
atggggcaagcgaatagggccttaaagtag

SEQ ID NO: 914 - DNA, 21 bp, Artificial Sequence
  Made in the lab
catggcagaccttcatcttcc

SEQ ID NO: 915 - DNA, 22 bp, Artificial Sequence
  Made in the lab
acatggcagaccttcatcttcc

SEQ ID NO: 916 - DNA, 23 bp, Artificial Sequence
  Made in the lab
aacatggcagaccttcatcttcc

SEQ ID NO: 917 - DNA, 24 bp, Artificial Sequence
  Made in the lab
gaacatggcagaccttcatcttcc

SEQ ID NO: 918 - DNA, 25 bp, Artificial Sequence
  Made in the lab
agaacatggcagaccttcatcttcc

SEQ ID NO: 919 - DNA, 26 bp, Artificial Sequence
  Made in the lab
tagaacatggcagaccttcatcttcc

SEQ ID NO: 920 - DNA, 27 bp, Artificial Sequence
  Made in the lab
gtagaacatggcagaccttcatcttcc

SEQ ID NO: 921 - DNA, 28 bp, Artificial Sequence
  Made in the lab
agtagaacatggcagaccttcatcttcc

SEQ ID NO: 922 - DNA, 29 bp, Artificial Sequence
  Made in the lab
cagtagaacatggcagaccttcatcttcc

SEQ ID NO: 923 - DNA, 30 bp, Artificial Sequence
  Made in the lab
tcagtagaacatggcagaccttcatcttcc

SEQ ID NO: 924 - DNA, 21 bp, Artificial Sequence
  Made in the lab
cccgggaaagcaactgtttga

SEQ ID NO: 925 - DNA, 22 bp, Artificial Sequence
  Made in the lab
acccgggaaagcaactgtttga

SEQ ID NO: 926 - DNA, 23 bp, Artificial Sequence
  Made in the lab
aacccgggaaagcaactgtttga

SEQ ID NO: 927 - DNA, 24 bp, Artificial Sequence
  Made in the lab
gaacccgggaaagcaactgtttga

SEQ ID NO: 928 - DNA, 25 bp, Artificial Sequence
  Made in the lab
tgaacccgggaaagcaactgtttga

SEQ ID NO: 929 - DNA, 26 bp, Artificial Sequence
  Made in the lab
ctgaacccgggaaagcaactgtttga

SEQ ID NO: 930 - DNA, 27 bp, Artificial Sequence
  Made in the lab
actgaacccgggaaagcaactgtttga

SEQ ID NO: 931 - DNA, 28 bp, Artificial Sequence
  Made in the lab
cactgaacccgggaaagcaactgtttga

SEQ ID NO: 932 - DNA, 29 bp, Artificial Sequence
  Made in the lab
tcactgaacccgggaaagcaactgtttga

SEQ ID NO: 933 - DNA, 30 bp, Artificial Sequence
  Made in the lab
ctcactgaacccgggaaagcaactgtttga

SEQ ID NO: 934 - DNA, 21 bp, Artificial Sequence
  Made in the lab
ccatgtccggctgatttattt

SEQ ID NO: 935 - DNA, 22 bp, Artificial Sequence
  Made in the lab
accatgtccggctgatttattt

SEQ ID NO: 936 - DNA, 23 bp, Artificial Sequence
  Made in the lab
caccatgtccggctgatttattt

SEQ ID NO: 937 - DNA, 24 bp, Artificial Sequence
  Made in the lab
ccaccatgtccggctgatttattt

SEQ ID NO: 938 - DNA, 25 bp, Artificial Sequence
  Made in the lab
gccaccatgtccggctgatttattt

SEQ ID NO: 939 - DNA, 26 bp, Artificial Sequence
  Made in the lab
tgccaccatgtccggctgatttattt

SEQ ID NO: 940 - DNA, 27 bp, Artificial Sequence
  Made in the lab
atgccaccatgtccggctgatttattt

SEQ ID NO: 941 - DNA, 28 bp, Artificial Sequence
  Made in the lab
catgccaccatgtccggctgatttattt

SEQ ID NO: 942 - DNA, 29 bp, Artificial Sequence
  Made in the lab
acatgccaccatgtccggctgatttattt

SEQ ID NO: 943 - DNA, 30 bp, Artificial Sequence
  Made in the lab
cacatgccaccatgtccggctgatttattt

SEQ ID NO: 944 - DNA, 21 bp, Artificial Sequence
  Made in the lab
ggatgggccgactcttgtatt

SEQ ID NO: 945 - DNA, 22 bp, Artificial Sequence
  Made in the lab
aggatgggccgactcttgtatt

SEQ ID NO: 946 - DNA, 23 bp, Artificial Sequence
  Made in the lab
gaggatgggccgactcttgtatt

SEQ ID NO: 947 - DNA, 24 bp, Artificial Sequence
  Made in the lab
tgaggatgggccgactcttgtatt

SEQ ID NO: 948 - DNA, 25 bp, Artificial Sequence
  Made in the lab
ttgaggatgggccgactcttgtatt

SEQ ID NO: 949 - DNA, 26 bp, Artificial Sequence
  Made in the lab
tttgaggatgggccgactcttgtatt

SEQ ID NO: 950 - DNA, 27 bp, Artificial Sequence
  Made in the lab
ttttgaggatgggccgactcttgtatt

SEQ ID NO: 951 - DNA, 28 bp, Artificial Sequence
  Made in the lab
gttttgaggatgggccgactcttgtatt

SEQ ID NO: 952 - DNA, 29 bp, Artificial Sequence
  Made in the lab
ggttttgaggatgggccgactcttgtatt

SEQ ID NO: 953 - DNA, 30 bp, Artificial Sequence
  Made in the lab
tggttttgaggatgggccgactcttgtatt

SEQ ID NO: 954 - DNA, 21 bp, Artificial Sequence
  Made in the lab
gagggatgtaactattgaatt

SEQ ID NO: 955 - DNA, 22 bp, Artificial Sequence
  Made in the lab
agagggatgtaactattgaatt

SEQ ID NO: 956 - DNA, 23 bp, Artificial Sequence
  Made in the lab
aagagggatgtaactattgaatt

SEQ ID NO: 957 - DNA, 24 bp, Artificial Sequence
  Made in the lab
aaagagggatgtaactattgaatt

SEQ ID NO: 958 - DNA, 25 bp, Artificial Sequence
  Made in the lab
taaagagggatgtaactattgaatt

SEQ ID NO: 959 - DNA, 26 bp, Artificial Sequence
  Made in the lab
ataaagagggatgtaactattgaatt

SEQ ID NO: 960 - DNA, 27 bp, Artificial Sequence
  Made in the lab
gataaagagggatgtaactattgaatt

SEQ ID NO: 961 - DNA, 28 bp, Artificial Sequence
  Made in the lab
tgataaagagggatgtaactattgaatt

SEQ ID NO: 962 - DNA, 29 bp, Artificial Sequence
  Made in the lab
atgataaagagggatgtaactattgaatt

SEQ ID NO: 963 - DNA, 30 bp, Artificial Sequence
  Made in the lab
tatgataaagagggatgtaactattgaatt

SEQ ID NO: 964 - DNA, 21 bp, Artificial Sequence
  Made in the lab
ccaaaggaatcgtttcaaatg

SEQ ID NO: 965 - DNA, 22 bp, Artificial Sequence
  Made in the lab
accaaaggaatcgtttcaaatg

SEQ ID NO: 966 - DNA, 23 bp, Artificial Sequence
  Made in the lab
aaccaaaggaatcgtttcaaatg

SEQ ID NO: 967 - DNA, 24 bp, Artificial Sequence
  Made in the lab
aaaccaaaggaatcgtttcaaatg

SEQ ID NO: 968 - DNA, 25 bp, Artificial Sequence
  Made in the lab
gaaaccaaaggaatcgtttcaaatg

SEQ ID NO: 969 - DNA, 26 bp, Artificial Sequence
  Made in the lab
ggaaaccaaaggaatcgtttcaaatg

SEQ ID NO: 970 - DNA, 27 bp, Artificial Sequence
  Made in the lab
aggaaaccaaaggaatcgtttcaaatg

SEQ ID NO: 971 - DNA, 28 bp, Artificial Sequence
  Made in the lab
aaggaaaccaaaggaatcgtttcaaatg

SEQ ID NO: 972 - DNA, 29 bp, Artificial Sequence
  Made in the lab
aaaggaaaccaaaggaatcgtttcaaatg

SEQ ID NO: 973 - DNA, 30 bp, Artificial Sequence
  Made in the lab
caaaggaaaccaaaggaatcgtttcaaatg

SEQ ID NO: 974 - DNA, 21 bp, Artificial Sequence
  Made in the lab
gtttcaccttgggtttgtatt

SEQ ID NO: 975 - DNA, 22 bp, Artificial Sequence
  Made in the lab
agtttcaccttgggtttgtatt

SEQ ID NO: 976 - DNA, 23 bp, Artificial Sequence
  Made in the lab
aagtttcaccttgggtttgtatt

SEQ ID NO: 977 - DNA, 24 bp, Artificial Sequence
  Made in the lab
caagtttcaccttgggtttgtatt

SEQ ID NO: 978 - DNA, 25 bp, Artificial Sequence
  Made in the lab
gcaagtttcaccttgggtttgtatt

SEQ ID NO: 979 - DNA, 26 bp, Artificial Sequence
  Made in the lab
agcaagtttcaccttgggtttgtatt

SEQ ID NO: 980 - DNA, 27 bp, Artificial Sequence
  Made in the lab
cagcaagtttcaccttgggtttgtatt

SEQ ID NO: 981 - DNA, 28 bp, Artificial Sequence
  Made in the lab
ccagcaagtttcaccttgggtttgtatt

SEQ ID NO: 982 - DNA, 29 bp, Artificial Sequence
  Made in the lab
cccagcaagtttcaccttgggtttgtatt

SEQ ID NO: 983 - DNA, 30 bp, Artificial Sequence
  Made in the lab
tcccagcaagtttcaccttgggtttgtatt

SEQ ID NO: 984 - DNA, 21 bp, Artificial Sequence
  Made in the lab
gagtgcagttgattctgaatc

SEQ ID NO: 985 - DNA, 22 bp, Artificial Sequence
  Made in the lab
agagtgcagttgattctgaatc

SEQ ID NO: 986 - DNA, 23 bp, Artificial Sequence
  Made in the lab
aagagtgcagttgattctgaatc

SEQ ID NO: 987 - DNA, 24 bp, Artificial Sequence
  Made in the lab
caagagtgcagttgattctgaatc

SEQ ID NO: 988 - DNA, 25 bp, Artificial Sequence
  Made in the lab
tcaagagtgcagttgattctgaatc

SEQ ID NO: 989 - DNA, 26 bp, Artificial Sequence
  Made in the lab
ttcaagagtgcagttgattctgaatc

SEQ ID NO: 990 - DNA, 27 bp, Artificial Sequence
  Made in the lab
tttcaagagtgcagttgattctgaatc

SEQ ID NO: 991 - DNA, 28 bp, Artificial Sequence
  Made in the lab
ttttcaagagtgcagttgattctgaatc

SEQ ID NO: 992 - DNA, 29 bp, Artificial Sequence
  Made in the lab
cttttcaagagtgcagttgattctgaatc

SEQ ID NO: 993 - DNA, 30 bp, Artificial Sequence
  Made in the lab
acttttcaagagtgcagttgattctgaatc

SEQ ID NO: 994 - DNA, 21 bp, Artificial Sequence
  Made in the lab
attccatgtccctgtataatt

SEQ ID NO: 995 - DNA, 22 bp, Artificial Sequence
  Made in the lab
aattccatgtccctgtataatt

SEQ ID NO: 996 - DNA, 23 bp, Artificial Sequence
  Made in the lab
aaattccatgtccctgtataatt

SEQ ID NO: 997 - DNA, 24 bp, Artificial Sequence
  Made in the lab
caaattccatgtccctgtataatt

SEQ ID NO: 998 - DNA, 25 bp, Artificial Sequence
  Made in the lab
ccaaattccatgtccctgtataatt

SEQ ID NO: 999 - DNA, 26 bp, Artificial Sequence
  Made in the lab
gccaaattccatgtccctgtataatt

SEQ ID NO: 1000 - DNA, 27 bp, Artificial Sequence
  Made in the lab
tgccaaattccatgtccctgtataatt

SEQ ID NO: 1001 - DNA, 28 bp, Artificial Sequence
  Made in the lab
ttgccaaattccatgtccctgtataatt

SEQ ID NO: 1002 - DNA, 29 bp, Artificial Sequence
  Made in the lab
cttgccaaattccatgtccctgtataatt

SEQ ID NO: 1003 - DNA, 30 bp, Artificial Sequence
  Made in the lab
ccttgccaaattccatgtccctgtataatt

SEQ ID NO: 1004 - DNA, 21 bp, Artificial Sequence
  Made in the lab
atacaaacaagcacagacatt

SEQ ID NO: 1005 - DNA, 22 bp, Artificial Sequence
  Made in the lab
aatacaaacaagcacagacatt

SEQ ID NO: 1006 - DNA, 23 bp, Artificial Sequence
  Made in the lab
aaatacaaacaagcacagacatt

SEQ ID NO: 1007 - DNA, 24 bp, Artificial Sequence
  Made in the lab
aaaatacaaacaagcacagacatt

SEQ ID NO: 1008 - DNA, 25 bp, Artificial Sequence
  Made in the lab
taaaatacaaacaagcacagacatt

SEQ ID NO: 1009 - DNA, 26 bp, Artificial Sequence
  Made in the lab
ctaaaatacaaacaagcacagacatt

SEQ ID NO: 1010 - DNA, 27 bp, Artificial Sequence
  Made in the lab
cctaaaatacaaacaagcacagacatt

SEQ ID NO: 1011 - DNA, 28 bp, Artificial Sequence
  Made in the lab
tcctaaaatacaaacaagcacagacatt

SEQ ID NO: 1012 - DNA, 29 bp, Artificial Sequence
  Made in the lab
gtcctaaaatacaaacaagcacagacatt

SEQ ID NO: 1013 - DNA, 30 bp, Artificial Sequence
  Made in the lab
tgtcctaaaatacaaacaagcacagacatt

SEQ ID NO: 1014 - DNA, 21 bp, Artificial Sequence
  Made in the lab
accaagttcttgtctcagatt

SEQ ID NO: 1015 - DNA, 22 bp, Artificial Sequence
  Made in the lab
aaccaagttcttgtctcagatt

SEQ ID NO: 1016 - DNA, 23 bp, Artificial Sequence
  Made in the lab
aaaccaagttcttgtctcagatt

SEQ ID NO: 1017 - DNA, 24 bp, Artificial Sequence
  Made in the lab
gaaaccaagttcttgtctcagatt

SEQ ID NO: 1018 - DNA, 25 bp, Artificial Sequence
  Made in the lab
tgaaaccaagttcttgtctcagatt

SEQ ID NO: 1019 - DNA, 26 bp, Artificial Sequence
  Made in the lab
ttgaaaccaagttcttgtctcagatt

SEQ ID NO: 1020 - DNA, 27 bp, Artificial Sequence
  Made in the lab
tttgaaaccaagttcttgtctcagatt

SEQ ID NO: 1021 - DNA, 28 bp, Artificial Sequence
  Made in the lab
ctttgaaaccaagttcttgtctcagatt

SEQ ID NO: 1022 - DNA, 29 bp, Artificial Sequence
  Made in the lab
tctttgaaaccaagttcttgtctcagatt

SEQ ID NO: 1023 - DNA, 30 bp, Artificial Sequence
  Made in the lab
atctttgaaaccaagttcttgtctcagatt

SEQ ID NO: 1024 - DNA, 21 bp, Artificial Sequence
  Made in the lab
ccaagttcttgtctcagattg

SEQ ID NO: 1025 - DNA, 22 bp, Artificial Sequence
  Made in the lab
accaagttcttgtctcagattg

SEQ ID NO: 1026 - DNA, 23 bp, Artificial Sequence
  Made in the lab
aaccaagttcttgtctcagattg

SEQ ID NO: 1027 - DNA, 24 bp, Artificial Sequence
  Made in the lab
aaaccaagttcttgtctcagattg

SEQ ID NO: 1028 - DNA, 25 bp, Artificial Sequence
  Made in the lab
gaaaccaagttcttgtctcagattg

SEQ ID NO: 1029 - DNA, 26 bp, Artificial Sequence
  Made in the lab
tgaaaccaagttcttgtctcagattg

SEQ ID NO: 1030 - DNA, 27 bp, Artificial Sequence
  Made in the lab
ttgaaaccaagttcttgtctcagattg

SEQ ID NO: 1031 - DNA, 28 bp, Artificial Sequence
  Made in the lab
tttgaaaccaagttcttgtctcagattg

SEQ ID NO: 1032 - DNA, 29 bp, Artificial Sequence
  Made in the lab
ctttgaaaccaagttcttgtctcagattg

SEQ ID NO: 1033 - DNA, 30 bp, Artificial Sequence
  Made in the lab
tctttgaaaccaagttcttgtctcagattg

SEQ ID NO: 1034 - DNA, 21 bp, Artificial Sequence
  Made in the lab
tggactcatggcttagaaatc

SEQ ID NO: 1035 - DNA, 22 bp, Artificial Sequence
  Made in the lab
atggactcatggcttagaaatc

SEQ ID NO: 1036 - DNA, 23 bp, Artificial Sequence
  Made in the lab
aatggactcatggcttagaaatc

SEQ ID NO: 1037 - DNA, 24 bp, Artificial Sequence
  Made in the lab
aaatggactcatggcttagaaatc

SEQ ID NO: 1038 - DNA, 25 bp, Artificial Sequence
  Made in the lab
caaatggactcatggcttagaaatc

SEQ ID NO: 1039 - DNA, 26 bp, Artificial Sequence
  Made in the lab
tcaaatggactcatggcttagaaatc

SEQ ID NO: 1040 - DNA, 27 bp, Artificial Sequence
  Made in the lab
ttcaaatggactcatggcttagaaatc

SEQ ID NO: 1041 - DNA, 28 bp, Artificial Sequence
  Made in the lab
tttcaaatggactcatggcttagaaatc

SEQ ID NO: 1042 - DNA, 29 bp, Artificial Sequence
  Made in the lab
gtttcaaatggactcatggcttagaaatc

SEQ ID NO: 1043 - DNA, 30 bp, Artificial Sequence
  Made in the lab
cgtttcaaatggactcatggcttagaaatc

SEQ ID NO: 1044 - DNA, 21 bp, Artificial Sequence
  Made in the lab
acctcagggacaacatttttg

SEQ ID NO: 1045 - DNA, 22 bp, Artificial Sequence
  Made in the lab
aacctcagggacaacatttttg

SEQ ID NO: 1046 - DNA, 23 bp, Artificial Sequence
  Made in the lab
aaacctcagggacaacatttttg

SEQ ID NO: 1047 - DNA, 24 bp, Artificial Sequence
  Made in the lab
aaaacctcagggacaacatttttg

SEQ ID NO: 1048 - DNA, 25 bp, Artificial Sequence
  Made in the lab
taaaacctcagggacaacatttttg

SEQ ID NO: 1049 - DNA, 26 bp, Artificial Sequence
  Made in the lab
ataaaacctcagggacaacatttttg

SEQ ID NO: 1050 - DNA, 27 bp, Artificial Sequence
  Made in the lab
aataaaacctcagggacaacatttttg

SEQ ID NO: 1051 - DNA, 28 bp, Artificial Sequence
  Made in the lab
aaataaaacctcagggacaacatttttg

SEQ ID NO: 1052 - DNA, 29 bp, Artificial Sequence
  Made in the lab
caaataaaacctcagggacaacatttttg

SEQ ID NO: 1053 - DNA, 30 bp, Artificial Sequence
  Made in the lab
ccaaataaaacctcagggacaacatttttg

SEQ ID NO: 1054 - DNA, 21 bp, Artificial Sequence
  Made in the lab
cttccatccctacttttcaag

SEQ ID NO: 1055 - DNA, 22 bp, Artificial Sequence
  Made in the lab
acttccatccctacttttcaag

SEQ ID NO: 1056 - DNA, 23 bp, Artificial Sequence
  Made in the lab
aacttccatccctacttttcaag

SEQ ID NO: 1057 - DNA, 24 bp, Artificial Sequence
  Made in the lab
aaacttccatccctacttttcaag

SEQ ID NO: 1058 - DNA, 25 bp, Artificial Sequence
  Made in the lab
aaaacttccatccctacttttcaag

SEQ ID NO: 1059 - DNA, 26 bp, Artificial Sequence
  Made in the lab
aaaaacttccatccctacttttcaag

SEQ ID NO: 1060 - DNA, 27 bp, Artificial Sequence
  Made in the lab
taaaaacttccatccctacttttcaag

SEQ ID NO: 1061 - DNA, 28 bp, Artificial Sequence
  Made in the lab
ttaaaaacttccatccctacttttcaag

SEQ ID NO: 1062 - DNA, 29 bp, Artificial Sequence
  Made in the lab
cttaaaaacttccatccctacttttcaag

SEQ ID NO: 1063 - DNA, 30 bp, Artificial Sequence
  Made in the lab
gcttaaaaacttccatccctacttttcaag

SEQ ID NO: 1064 - DNA, 21 bp, Artificial Sequence
  Made in the lab
gcaaagttgggtgtaattagg

SEQ ID NO: 1065 - DNA, 22 bp, Artificial Sequence
  Made in the lab
agcaaagttgggtgtaattagg

SEQ ID NO: 1066 - DNA, 23 bp, Artificial Sequence
  Made in the lab
aagcaaagttgggtgtaattagg

SEQ ID NO: 1067 - DNA, 24 bp, Artificial Sequence
  Made in the lab
taagcaaagttgggtgtaattagg

SEQ ID NO: 1068 - DNA, 25 bp, Artificial Sequence
  Made in the lab
ttaagcaaagttgggtgtaattagg

SEQ ID NO: 1069 - DNA, 26 bp, Artificial Sequence
  Made in the lab
tttaagcaaagttgggtgtaattagg

SEQ ID NO: 1070 - DNA, 27 bp, Artificial Sequence
  Made in the lab
ttttaagcaaagttgggtgtaattagg

SEQ ID NO: 1071 - DNA, 28 bp, Artificial Sequence
  Made in the lab
cttttaagcaaagttgggtgtaattagg

SEQ ID NO: 1072 - DNA, 29 bp, Artificial Sequence
  Made in the lab
acttttaagcaaagttgggtgtaattagg

SEQ ID NO: 1073 - DNA, 30 bp, Artificial Sequence
  Made in the lab
gacttttaagcaaagttgggtgtaattagg

SEQ ID NO: 1074 - DNA, 21 bp, Artificial Sequence
  Made in the lab
cctcagggacaacatttttgg

SEQ ID NO: 1075 - DNA, 22 bp, Artificial Sequence
  Made in the lab
acctcagggacaacatttttgg

SEQ ID NO: 1076 - DNA, 23 bp, Artificial Sequence
  Made in the lab
aacctcagggacaacatttttgg

SEQ ID NO: 1077 - DNA, 24 bp, Artificial Sequence
  Made in the lab
aaacctcagggacaacatttttgg

SEQ ID NO: 1078 - DNA, 25 bp, Artificial Sequence
  Made in the lab
aaaacctcagggacaacatttttgg

SEQ ID NO: 1079 - DNA, 26 bp, Artificial Sequence
  Made in the lab
taaaacctcagggacaacatttttgg

SEQ ID NO: 1080 - DNA, 27 bp, Artificial Sequence
  Made in the lab
ataaaacctcagggacaacatttttgg

SEQ ID NO: 1081 - DNA, 28 bp, Artificial Sequence
  Made in the lab
aataaaacctcagggacaacatttttgg

SEQ ID NO: 1082 - DNA, 29 bp, Artificial Sequence
  Made in the lab
aaataaaacctcagggacaacatttttgg

SEQ ID NO: 1083 - DNA, 30 bp, Artificial Sequence
  Made in the lab
caaataaaacctcagggacaacatttttgg

SEQ ID NO: 1084 - DNA, 21 bp, Artificial Sequence
  Made in the lab
gcccgcctctgtcctaaaata

SEQ ID NO: 1085 - DNA, 22 bp, Artificial Sequence
  Made in the lab
agcccgcctctgtcctaaaata

SEQ ID NO: 1086 - DNA, 23 bp, Artificial Sequence
  Made in the lab
aagcccgcctctgtcctaaaata

SEQ ID NO: 1087 - DNA, 24 bp, Artificial Sequence
  Made in the lab
aaagcccgcctctgtcctaaaata

SEQ ID NO: 1088 - DNA, 25 bp, Artificial Sequence
  Made in the lab
gaaagcccgcctctgtcctaaaata

SEQ ID NO: 1089 - DNA, 26 bp, Artificial Sequence
  Made in the lab
tgaaagcccgcctctgtcctaaaata

SEQ ID NO: 1090 - DNA, 27 bp, Artificial Sequence
  Made in the lab
ctgaaagcccgcctctgtcctaaaata

SEQ ID NO: 1091 - DNA, 28 bp, Artificial Sequence
  Made in the lab
tctgaaagcccgcctctgtcctaaaata

SEQ ID NO: 1092 - DNA, 29 bp, Artificial Sequence
  Made in the lab
atctgaaagcccgcctctgtcctaaaata

SEQ ID NO: 1093 - DNA, 30 bp, Artificial Sequence
  Made in the lab
aatctgaaagcccgcctctgtcctaaaata

SEQ ID NO: 1094 - DNA, 21 bp, Artificial Sequence
  Made in the lab
catgcctagtccaacattttt

SEQ ID NO: 1095 - DNA, 22 bp, Artificial Sequence
  Made in the lab
acatgcctagtccaacattttt

SEQ ID NO: 1096 - DNA, 23 bp, Artificial Sequence
  Made in the lab
aacatgcctagtccaacattttt

SEQ ID NO: 1097 - DNA, 24 bp, Artificial Sequence
  Made in the lab
gaacatgcctagtccaacattttt

SEQ ID NO: 1098 - DNA, 25 bp, Artificial Sequence
  Made in the lab
tgaacatgcctagtccaacattttt

SEQ ID NO: 1099 - DNA, 26 bp, Artificial Sequence
  Made in the lab
ctgaacatgcctagtccaacattttt

SEQ ID NO: 1100 - DNA, 27 bp, Artificial Sequence
  Made in the lab
actgaacatgcctagtccaacattttt

SEQ ID NO: 1101 - DNA, 28 bp, Artificial Sequence
  Made in the lab
cactgaacatgcctagtccaacattttt

SEQ ID NO: 1102 - DNA, 29 bp, Artificial Sequence
  Made in the lab
tcactgaacatgcctagtccaacattttt

SEQ ID NO: 1103 - DNA, 30 bp, Artificial Sequence
  Made in the lab
ttcactgaacatgcctagtccaacattttt

SEQ ID NO: 1104 - DNA, 21 bp, Artificial Sequence
  Made in the lab
gaagagtgcagatacactttg

SEQ ID NO: 1105 - DNA, 22 bp, Artificial Sequence
  Made in the lab
agaagagtgcagatacactttg

SEQ ID NO: 1106 - DNA, 23 bp, Artificial Sequence
  Made in the lab
aagaagagtgcagatacactttg

SEQ ID NO: 1107 - DNA, 24 bp, Artificial Sequence
  Made in the lab
gaagaagagtgcagatacactttg

SEQ ID NO: 1108 - DNA, 25 bp, Artificial Sequence
  Made in the lab
tgaagaagagtgcagatacactttg

SEQ ID NO: 1109 - DNA, 26 bp, Artificial Sequence
  Made in the lab
ttgaagaagagtgcagatacactttg

SEQ ID NO: 1110 - DNA, 27 bp, Artificial Sequence
  Made in the lab
tttgaagaagagtgcagatacactttg

SEQ ID NO: 1111 - DNA, 28 bp, Artificial Sequence
  Made in the lab
gtttgaagaagagtgcagatacactttg

SEQ ID NO: 1112 - DNA, 29 bp, Artificial Sequence
  Made in the lab
cgtttgaagaagagtgcagatacactttg

SEQ ID NO: 1113 - DNA, 30 bp, Artificial Sequence
  Made in the lab
ccgtttgaagaagagtgcagatacactttg

SEQ ID NO: 1114 - DNA, 21 bp, Artificial Sequence
  Made in the lab
gtcttctgatgtcatatcatt

SEQ ID NO: 1115 - DNA, 22 bp, Artificial Sequence
  Made in the lab
agtcttctgatgtcatatcatt

SEQ ID NO: 1116 - DNA, 23 bp, Artificial Sequence
  Made in the lab
aagtcttctgatgtcatatcatt

SEQ ID NO: 1117 - DNA, 24 bp, Artificial Sequence
  Made in the lab
aaagtcttctgatgtcatatcatt

SEQ ID NO: 1118 - DNA, 25 bp, Artificial Sequence
  Made in the lab
taaagtcttctgatgtcatatcatt

SEQ ID NO: 1119 - DNA, 26 bp, Artificial Sequence
  Made in the lab
ttaaagtcttctgatgtcatatcatt

SEQ ID NO: 1120 - DNA, 27 bp, Artificial Sequence
  Made in the lab
tttaaagtcttctgatgtcatatcatt

SEQ ID NO: 1121 - DNA, 28 bp, Artificial Sequence
  Made in the lab
ttttaaagtcttctgatgtcatatcatt

SEQ ID NO: 1122 - DNA, 29 bp, Artificial Sequence
  Made in the lab
attttaaagtcttctgatgtcatatcatt

SEQ ID NO: 1123 - DNA, 30 bp, Artificial Sequence
  Made in the lab
aattttaaagtcttctgatgtcatatcatt

SEQ ID NO: 1124 - DNA, 21 bp, Artificial Sequence
  Made in the lab
ctctaaaggatcagctgattt

SEQ ID NO: 1125 - DNA, 22 bp, Artificial Sequence
  Made in the lab
actctaaaggatcagctgattt

SEQ ID NO: 1126 - DNA, 23 bp, Artificial Sequence
  Made in the lab
aactctaaaggatcagctgattt

SEQ ID NO: 1127 - DNA, 24 bp, Artificial Sequence
  Made in the lab
caactctaaaggatcagctgattt

SEQ ID NO: 1128 - DNA, 25 bp, Artificial Sequence
  Made in the lab
gcaactctaaaggatcagctgattt

SEQ ID NO: 1129 - DNA, 26 bp, Artificial Sequence
  Made in the lab
ggcaactctaaaggatcagctgattt

SEQ ID NO: 1130 - DNA, 27 bp, Artificial Sequence
  Made in the lab
tggcaactctaaaggatcagctgattt

SEQ ID NO: 1131 - DNA, 28 bp, Artificial Sequence
  Made in the lab
atggcaactctaaaggatcagctgattt

SEQ ID NO: 1132 - DNA, 29 bp, Artificial Sequence
  Made in the lab
tatggcaactctaaaggatcagctgattt

SEQ ID NO: 1133 - DNA, 30 bp, Artificial Sequence
  Made in the lab
atatggcaactctaaaggatcagctgattt

SEQ ID NO: 1134 - DNA, 21 bp, Artificial Sequence
  Made in the lab
accgtgttattggaagcggtt

SEQ ID NO: 1135 - DNA, 22 bp, Artificial Sequence
  Made in the lab
aaccgtgttattggaagcggtt

SEQ ID NO: 1136 - DNA, 23 bp, Artificial Sequence
  Made in the lab
aaaccgtgttattggaagcggtt

SEQ ID NO: 1137 - DNA, 24 bp, Artificial Sequence
  Made in the lab
aaaaccgtgttattggaagcggtt

SEQ ID NO: 1138 - DNA, 25 bp, Artificial Sequence
  Made in the lab
aaaaaccgtgttattggaagcggtt

SEQ ID NO: 1139 - DNA, 26 bp, Artificial Sequence
  Made in the lab
caaaaaccgtgttattggaagcggtt

SEQ ID NO: 1140 - DNA, 27 bp, Artificial Sequence
  Made in the lab
ccaaaaaccgtgttattggaagcggtt

SEQ ID NO: 1141 - DNA, 28 bp, Artificial Sequence
  Made in the lab
cccaaaaaccgtgttattggaagcggtt

SEQ ID NO: 1142 - DNA, 29 bp, Artificial Sequence
  Made in the lab
tcccaaaaaccgtgttattggaagcggtt

SEQ ID NO: 1143 - DNA, 30 bp, Artificial Sequence
  Made in the lab
ttcccaaaaaccgtgttattggaagcggtt

SEQ ID NO: 1144 - DNA, 21 bp, Artificial Sequence
  Made in the lab
ggacttggcagatgaacttgc

SEQ ID NO: 1145 - DNA, 22 bp, Artificial Sequence
  Made in the lab
aggacttggcagatgaacttgc

SEQ ID NO: 1146 - DNA, 23 bp, Artificial Sequence
  Made in the lab
aaggacttggcagatgaacttgc

SEQ ID NO: 1147 - DNA, 24 bp, Artificial Sequence
  Made in the lab
gaaggacttggcagatgaacttgc

SEQ ID NO: 1148 - DNA, 25 bp, Artificial Sequence
  Made in the lab
tgaaggacttggcagatgaacttgc

SEQ ID NO: 1149 - DNA, 26 bp, Artificial Sequence
  Made in the lab
atgaaggacttggcagatgaacttgc

SEQ ID NO: 1150 - DNA, 27 bp, Artificial Sequence
  Made in the lab
aatgaaggacttggcagatgaacttgc

SEQ ID NO: 1151 - DNA, 28 bp, Artificial Sequence
  Made in the lab
taatgaaggacttggcagatgaacttgc

SEQ ID NO: 1152 - DNA, 29 bp, Artificial Sequence
  Made in the lab
ttaatgaaggacttggcagatgaacttgc

SEQ ID NO: 1153 - DNA, 30 bp, Artificial Sequence
  Made in the lab
cttaatgaaggacttggcagatgaacttgc

SEQ ID NO: 1154 - DNA, 21 bp, Artificial Sequence
  Made in the lab
gactctgcacccagatttagg

SEQ ID NO: 1155 - DNA, 22 bp, Artificial Sequence
  Made in the lab
agactctgcacccagatttagg

SEQ ID NO: 1156 - DNA, 23 bp, Artificial Sequence
  Made in the lab
aagactctgcacccagatttagg

SEQ ID NO: 1157 - DNA, 24 bp, Artificial Sequence
  Made in the lab
gaagactctgcacccagatttagg

SEQ ID NO: 1158 - DNA, 25 bp, Artificial Sequence
  Made in the lab
tgaagactctgcacccagatttagg

SEQ ID NO: 1159 - DNA, 26 bp, Artificial Sequence
  Made in the lab
ctgaagactctgcacccagatttagg

SEQ ID NO: 1160 - DNA, 27 bp, Artificial Sequence
  Made in the lab
tctgaagactctgcacccagatttagg

SEQ ID NO: 1161 - DNA, 28 bp, Artificial Sequence
  Made in the lab
ctctgaagactctgcacccagatttagg

SEQ ID NO: 1162 - DNA, 29 bp, Artificial Sequence
  Made in the lab
tctctgaagactctgcacccagatttagg

SEQ ID NO: 1163 - DNA, 30 bp, Artificial Sequence
  Made in the lab
ctctctgaagactctgcacccagatttagg

SEQ ID NO: 1164 - DNA, 21 bp, Artificial Sequence
  Made in the lab
caggattctaggtggaggttg

SEQ ID NO: 1165 - DNA, 22 bp, Artificial Sequence
  Made in the lab
acaggattctaggtggaggttg

SEQ ID NO: 1166 - DNA, 23 bp, Artificial Sequence
  Made in the lab
aacaggattctaggtggaggttg

SEQ ID NO: 1167 - DNA, 24 bp, Artificial Sequence
  Made in the lab
caacaggattctaggtggaggttg

SEQ ID NO: 1168 - DNA, 25 bp, Artificial Sequence
  Made in the lab
acaacaggattctaggtggaggttg

SEQ ID NO: 1169 - DNA, 26 bp, Artificial Sequence
  Made in the lab
tacaacaggattctaggtggaggttg

SEQ ID NO: 1170 - DNA, 27 bp, Artificial Sequence
  Made in the lab
ctacaacaggattctaggtggaggttg

SEQ ID NO: 1171 - DNA, 28 bp, Artificial Sequence
  Made in the lab
gctacaacaggattctaggtggaggttg

SEQ ID NO: 1172 - DNA, 29 bp, Artificial Sequence
  Made in the lab
ggctacaacaggattctaggtggaggttg

SEQ ID NO: 1173 - DNA, 30 bp, Artificial Sequence
  Made in the lab
aggctacaacaggattctaggtggaggttg

SEQ ID NO: 1174 - DNA, 21 bp, Artificial Sequence
  Made in the lab
cagaccccccagaataagatt

SEQ ID NO: 1175 - DNA, 22 bp, Artificial Sequence
  Made in the lab
acagaccccccagaataagatt

SEQ ID NO: 1176 - DNA, 23 bp, Artificial Sequence
  Made in the lab
aacagaccccccagaataagatt

SEQ ID NO: 1177 - DNA, 24 bp, Artificial Sequence
  Made in the lab
gaacagaccccccagaataagatt

SEQ ID NO: 1178 - DNA, 25 bp, Artificial Sequence
  Made in the lab
agaacagaccccccagaataagatt

SEQ ID NO: 1179 - DNA, 26 bp, Artificial Sequence
  Made in the lab
aagaacagaccccccagaataagatt

SEQ ID NO: 1180 - DNA, 27 bp, Artificial Sequence
  Made in the lab
gaagaacagaccccccagaataagatt

SEQ ID NO: 1181 - DNA, 28 bp, Artificial Sequence
  Made in the lab
ggaagaacagaccccccagaataagatt

SEQ ID NO: 1182 - DNA, 29 bp, Artificial Sequence
  Made in the lab
aggaagaacagaccccccagaataagatt

SEQ ID NO: 1183 - DNA, 30 bp, Artificial Sequence
  Made in the lab
aaggaagaacagaccccccagaataagatt

SEQ ID NO: 1184 - DNA, 21 bp, Artificial Sequence
  Made in the lab
gagggagaaagccgtcttaat

SEQ ID NO: 1185 - DNA, 22 bp, Artificial Sequence
  Made in the lab
agagggagaaagccgtcttaat

SEQ ID NO: 1186 - DNA, 23 bp, Artificial Sequence
  Made in the lab
aagagggagaaagccgtcttaat

SEQ ID NO: 1187 - DNA, 24 bp, Artificial Sequence
  Made in the lab
caagagggagaaagccgtcttaat

SEQ ID NO: 1188 - DNA, 25 bp, Artificial Sequence
  Made in the lab
gcaagagggagaaagccgtcttaat

SEQ ID NO: 1189 - DNA, 26 bp, Artificial Sequence
  Made in the lab
agcaagagggagaaagccgtcttaat

SEQ ID NO: 1190 - DNA, 27 bp, Artificial Sequence
  Made in the lab
cagcaagagggagaaagccgtcttaat

SEQ ID NO: 1191 - DNA, 28 bp, Artificial Sequence
  Made in the lab
tcagcaagagggagaaagccgtcttaat

SEQ ID NO: 1192 - DNA, 29 bp, Artificial Sequence
  Made in the lab
gtcagcaagagggagaaagccgtcttaat

SEQ ID NO: 1193 - DNA, 30 bp, Artificial Sequence
  Made in the lab
cgtcagcaagagggagaaagccgtcttaat

SEQ ID NO: 1194 - DNA, 21 bp, Artificial Sequence
  Made in the lab
tgctgtacgtactgcatttgc

SEQ ID NO: 1195 - DNA, 22 bp, Artificial Sequence
  Made in the lab
atgctgtacgtactgcatttgc

SEQ ID NO: 1196 - DNA, 23 bp, Artificial Sequence
  Made in the lab
aatgctgtacgtactgcatttgc

SEQ ID NO: 1197 - DNA, 24 bp, Artificial Sequence
  Made in the lab
caatgctgtacgtactgcatttgc

SEQ ID NO: 1198 - DNA, 25 bp, Artificial Sequence
  Made in the lab
ccaatgctgtacgtactgcatttgc

SEQ ID NO: 1199 - DNA, 26 bp, Artificial Sequence
  Made in the lab
gccaatgctgtacgtactgcatttgc

SEQ ID NO: 1200 - DNA, 27 bp, Artificial Sequence
  Made in the lab
tgccaatgctgtacgtactgcatttgc

SEQ ID NO: 1201 - DNA, 28 bp, Artificial Sequence
  Made in the lab
ctgccaatgctgtacgtactgcatttgc

SEQ ID NO: 1202 - DNA, 29 bp, Artificial Sequence
  Made in the lab
actgccaatgctgtacgtactgcatttgc

SEQ ID NO: 1203 - DNA, 30 bp, Artificial Sequence
  Made in the lab
cactgccaatgctgtacgtactgcatttgc

SEQ ID NO: 1204 - DNA, 21 bp, Artificial Sequence
  Made in the lab
aggatcagctgatttataatc

SEQ ID NO: 1205 - DNA, 22 bp, Artificial Sequence
  Made in the lab
aaggatcagctgatttataatc

SEQ ID NO: 1206 - DNA, 23 bp, Artificial Sequence
  Made in the lab
aaaggatcagctgatttataatc

SEQ ID NO: 1207 - DNA, 24 bp, Artificial Sequence
  Made in the lab
taaaggatcagctgatttataatc

SEQ ID NO: 1208 - DNA, 25 bp, Artificial Sequence
  Made in the lab
ctaaaggatcagctgatttataatc

SEQ ID NO: 1209 - DNA, 26 bp, Artificial Sequence
  Made in the lab
tctaaaggatcagctgatttataatc

SEQ ID NO: 1210 - DNA, 27 bp, Artificial Sequence
  Made in the lab
ctctaaaggatcagctgatttataatc

SEQ ID NO: 1211 - DNA, 28 bp, Artificial Sequence
  Made in the lab
actctaaaggatcagctgatttataatc

SEQ ID NO: 1212 - DNA, 29 bp, Artificial Sequence
  Made in the lab
aactctaaaggatcagctgatttataatc

SEQ ID NO: 1213 - DNA, 30 bp, Artificial Sequence
  Made in the lab
caactctaaaggatcagctgatttataatc

SEQ ID NO: 1214 - DNA, 21 bp, Artificial Sequence
  Made in the lab
ctcctgaagttagaaataaga

SEQ ID NO: 1215 - DNA, 22 bp, Artificial Sequence
  Made in the lab
actcctgaagttagaaataaga

SEQ ID NO: 1216 - DNA, 23 bp, Artificial Sequence
  Made in the lab
aactcctgaagttagaaataaga

SEQ ID NO: 1217 - DNA, 24 bp, Artificial Sequence
  Made in the lab
caactcctgaagttagaaataaga

SEQ ID NO: 1218 - DNA, 25 bp, Artificial Sequence
  Made in the lab
tcaactcctgaagttagaaataaga

SEQ ID NO: 1219 - DNA, 26 bp, Artificial Sequence
  Made in the lab
atcaactcctgaagttagaaataaga

SEQ ID NO: 1220 - DNA, 27 bp, Artificial Sequence
  Made in the lab
catcaactcctgaagttagaaataaga

SEQ ID NO: 1221 - DNA, 28 bp, Artificial Sequence
  Made in the lab
acatcaactcctgaagttagaaataaga

SEQ ID NO: 1222 - DNA, 29 bp, Artificial Sequence
  Made in the lab
aacatcaactcctgaagttagaaataaga

SEQ ID NO: 1223 - DNA, 30 bp, Artificial Sequence
  Made in the lab
aaacatcaactcctgaagttagaaataaga

SEQ ID NO: 1224 - DNA, 21 bp, Artificial Sequence
  Made in the lab
gaatggtttgtaaaatccaca

SEQ ID NO: 1225 - DNA, 22 bp, Artificial Sequence
  Made in the lab
agaatggtttgtaaaatccaca

SEQ ID NO: 1226 - DNA, 23 bp, Artificial Sequence
  Made in the lab
aagaatggtttgtaaaatccaca

SEQ ID NO: 1227 - DNA, 24 bp, Artificial Sequence
  Made in the lab
taagaatggtttgtaaaatccaca

SEQ ID NO: 1228 - DNA, 25 bp, Artificial Sequence
  Made in the lab
ataagaatggtttgtaaaatccaca

SEQ ID NO: 1229 - DNA, 26 bp, Artificial Sequence
  Made in the lab
aataagaatggtttgtaaaatccaca

SEQ ID NO: 1230 - DNA, 27 bp, Artificial Sequence
  Made in the lab
aaataagaatggtttgtaaaatccaca

SEQ ID NO: 1231 - DNA, 28 bp, Artificial Sequence
  Made in the lab
gaaataagaatggtttgtaaaatccaca

SEQ ID NO: 1232 - DNA, 29 bp, Artificial Sequence
  Made in the lab
agaaataagaatggtttgtaaaatccaca

SEQ ID NO: 1233 - DNA, 30 bp, Artificial Sequence
  Made in the lab
tagaaataagaatggtttgtaaaatccaca

SEQ ID NO: 1234 - DNA, 21 bp, Artificial Sequence
  Made in the lab
ggagctgcaattttaaagtct

SEQ ID NO: 1235 - DNA, 22 bp, Artificial Sequence
  Made in the lab
aggagctgcaattttaaagtct

SEQ ID NO: 1236 - DNA, 23 bp, Artificial Sequence
  Made in the lab
aaggagctgcaattttaaagtct

SEQ ID NO: 1237 - DNA, 24 bp, Artificial Sequence
  Made in the lab
aaaggagctgcaattttaaagtct

SEQ ID NO: 1238 - DNA, 25 bp, Artificial Sequence
  Made in the lab
aaaaggagctgcaattttaaagtct

SEQ ID NO: 1239 - DNA, 26 bp, Artificial Sequence
  Made in the lab
caaaaggagctgcaattttaaagtct

SEQ ID NO: 1240 - DNA, 27 bp, Artificial Sequence
  Made in the lab
ccaaaaggagctgcaattttaaagtct

SEQ ID NO: 1241 - DNA, 28 bp, Artificial Sequence
  Made in the lab
tccaaaaggagctgcaattttaaagtct

SEQ ID NO: 1242 - DNA, 29 bp, Artificial Sequence
  Made in the lab
atccaaaaggagctgcaattttaaagtct

SEQ ID NO: 1243 - DNA, 30 bp, Artificial Sequence
  Made in the lab
gatccaaaaggagctgcaattttaaagtct

SEQ ID NO: 1244 - DNA, 21 bp, Artificial Sequence
  Made in the lab
ccaactatccaagtgttatac

SEQ ID NO: 1245 - DNA, 22 bp, Artificial Sequence
  Made in the lab
accaactatccaagtgttatac

SEQ ID NO: 1246 - DNA, 23 bp, Artificial Sequence
  Made in the lab
aaccaactatccaagtgttatac

SEQ ID NO: 1247 - DNA, 24 bp, Artificial Sequence
  Made in the lab
caaccaactatccaagtgttatac

SEQ ID NO: 1248 - DNA, 25 bp, Artificial Sequence
  Made in the lab
gcaaccaactatccaagtgttatac

SEQ ID NO: 1249 - DNA, 26 bp, Artificial Sequence
  Made in the lab
tgcaaccaactatccaagtgttatac

SEQ ID NO: 1250 - DNA, 27 bp, Artificial Sequence
  Made in the lab
atgcaaccaactatccaagtgttatac

SEQ ID NO: 1251 - DNA, 28 bp, Artificial Sequence
  Made in the lab
aatgcaaccaactatccaagtgttatac

SEQ ID NO: 1252 - DNA, 29 bp, Artificial Sequence
  Made in the lab
caatgcaaccaactatccaagtgttatac

SEQ ID NO: 1253 - DNA, 30 bp, Artificial Sequence
  Made in the lab
acaatgcaaccaactatccaagtgttatac

SEQ ID NO: 1254 - DNA, 21 bp, Artificial Sequence
  Made in the lab
ctatccaagtgttataccaac

SEQ ID NO: 1255 - DNA, 22 bp, Artificial Sequence
  Made in the lab
actatccaagtgttataccaac

SEQ ID NO: 1256 - DNA, 23 bp, Artificial Sequence
  Made in the lab
aactatccaagtgttataccaac

SEQ ID NO: 1257 - DNA, 24 bp, Artificial Sequence
  Made in the lab
caactatccaagtgttataccaac

SEQ ID NO: 1258 - DNA, 25 bp, Artificial Sequence
  Made in the lab
ccaactatccaagtgttataccaac

SEQ ID NO: 1259 - DNA, 26 bp, Artificial Sequence
  Made in the lab
accaactatccaagtgttataccaac

SEQ ID NO: 1260 - DNA, 27 bp, Artificial Sequence
  Made in the lab
aaccaactatccaagtgttataccaac

SEQ ID NO: 1261 - DNA, 28 bp, Artificial Sequence
  Made in the lab
caaccaactatccaagtgttataccaac

SEQ ID NO: 1262 - DNA, 29 bp, Artificial Sequence
  Made in the lab
gcaaccaactatccaagtgttataccaac

SEQ ID NO: 1263 - DNA, 30 bp, Artificial Sequence
  Made in the lab
tgcaaccaactatccaagtgttataccaac

SEQ ID NO: 1264 - DNA, 21 bp, Artificial Sequence
  Made in the lab
gatggactgggaaaaacatca

SEQ ID NO: 1265 - DNA, 22 bp, Artificial Sequence
  Made in the lab
agatggactgggaaaaacatca

SEQ ID NO: 1266 - DNA, 23 bp, Artificial Sequence
  Made in the lab
aagatggactgggaaaaacatca

SEQ ID NO: 1267 - DNA, 24 bp, Artificial Sequence
  Made in the lab
taagatggactgggaaaaacatca

SEQ ID NO: 1268 - DNA, 25 bp, Artificial Sequence
  Made in the lab
ttaagatggactgggaaaaacatca

SEQ ID NO: 1269 - DNA, 26 bp, Artificial Sequence
  Made in the lab
tttaagatggactgggaaaaacatca

SEQ ID NO: 1270 - DNA, 27 bp, Artificial Sequence
  Made in the lab
ttttaagatggactgggaaaaacatca

SEQ ID NO: 1271 - DNA, 28 bp, Artificial Sequence
  Made in the lab
attttaagatggactgggaaaaacatca

SEQ ID NO: 1272 - DNA, 29 bp, Artificial Sequence
  Made in the lab
tattttaagatggactgggaaaaacatca

SEQ ID NO: 1273 - DNA, 30 bp, Artificial Sequence
  Made in the lab
atattttaagatggactgggaaaaacatca

SEQ ID NO: 1274 - DNA, 21 bp, Artificial Sequence
  Made in the lab
catggcagccttttccttaga

SEQ ID NO: 1275 - DNA, 22 bp, Artificial Sequence
  Made in the lab
acatggcagccttttccttaga

SEQ ID NO: 1276 - DNA, 23 bp, Artificial Sequence
  Made in the lab
aacatggcagccttttccttaga

SEQ ID NO: 1277 - DNA, 24 bp, Artificial Sequence
  Made in the lab
caacatggcagccttttccttaga

SEQ ID NO: 1278 - DNA, 25 bp, Artificial Sequence
  Made in the lab
ccaacatggcagccttttccttaga

SEQ ID NO: 1279 - DNA, 26 bp, Artificial Sequence
  Made in the lab
tccaacatggcagccttttccttaga

SEQ ID NO: 1280 - DNA, 27 bp, Artificial Sequence
  Made in the lab
ctccaacatggcagccttttccttaga

SEQ ID NO: 1281 - DNA, 28 bp, Artificial Sequence
  Made in the lab
tctccaacatggcagccttttccttaga

SEQ ID NO: 1282 - DNA, 29 bp, Artificial Sequence
  Made in the lab
atctccaacatggcagccttttccttaga

SEQ ID NO: 1283 - DNA, 30 bp, Artificial Sequence
  Made in the lab
gatctccaacatggcagccttttccttaga

SEQ ID NO: 1284 - DNA, 21 bp, Artificial Sequence
  Made in the lab
gtggttttcccaaaaaccgtg

SEQ ID NO: 1285 - DNA, 22 bp, Artificial Sequence
  Made in the lab
agtggttttcccaaaaaccgtg

SEQ ID NO: 1286 - DNA, 23 bp, Artificial Sequence
  Made in the lab
aagtggttttcccaaaaaccgtg

SEQ ID NO: 1287 - DNA, 24 bp, Artificial Sequence
  Made in the lab
taagtggttttcccaaaaaccgtg

SEQ ID NO: 1288 - DNA, 25 bp, Artificial Sequence
  Made in the lab
ataagtggttttcccaaaaaccgtg

SEQ ID NO: 1289 - DNA, 26 bp, Artificial Sequence
  Made in the lab
gataagtggttttcccaaaaaccgtg

SEQ ID NO: 1290 - DNA, 27 bp, Artificial Sequence
  Made in the lab
agataagtggttttcccaaaaaccgtg

SEQ ID NO: 1291 - DNA, 28 bp, Artificial Sequence
  Made in the lab
aagataagtggttttcccaaaaaccgtg

SEQ ID NO: 1292 - DNA, 29 bp, Artificial Sequence
  Made in the lab
gaagataagtggttttcccaaaaaccgtg

SEQ ID NO: 1293 - DNA, 30 bp, Artificial Sequence
  Made in the lab
ggaagataagtggttttcccaaaaaccgtg

SEQ ID NO: 1294 - DNA, 21 bp, Artificial Sequence
  Made in the lab
gaacagaccccccagaataag

SEQ ID NO: 1295 - DNA, 22 bp, Artificial Sequence
  Made in the lab
agaacagaccccccagaataag

SEQ ID NO: 1296 - DNA, 23 bp, Artificial Sequence
  Made in the lab
aagaacagaccccccagaataag

SEQ ID NO: 1297 - DNA, 24 bp, Artificial Sequence
  Made in the lab
gaagaacagaccccccagaataag

SEQ ID NO: 1298 - DNA, 25 bp, Artificial Sequence
  Made in the lab
ggaagaacagaccccccagaataag

SEQ ID NO: 1299 - DNA, 26 bp, Artificial Sequence
  Made in the lab
aggaagaacagaccccccagaataag

SEQ ID NO: 1300 - DNA, 27 bp, Artificial Sequence
  Made in the lab
aaggaagaacagaccccccagaataag

SEQ ID NO: 1301 - DNA, 28 bp, Artificial Sequence
  Made in the lab
aaaggaagaacagaccccccagaataag

SEQ ID NO: 1302 - DNA, 29 bp, Artificial Sequence
  Made in the lab
taaaggaagaacagaccccccagaataag

SEQ ID NO: 1303 - DNA, 30 bp, Artificial Sequence
  Made in the lab
ctaaaggaagaacagaccccccagaataag

SEQ ID NO: 1304 - DNA, 21 bp, Artificial Sequence
  Made in the lab
aggctgggagttcacccatta

SEQ ID NO: 1305 - DNA, 22 bp, Artificial Sequence
  Made in the lab
aaggctgggagttcacccatta

SEQ ID NO: 1306 - DNA, 23 bp, Artificial Sequence
  Made in the lab
aaaggctgggagttcacccatta

SEQ ID NO: 1307 - DNA, 24 bp, Artificial Sequence
  Made in the lab
gaaaggctgggagttcacccatta

SEQ ID NO: 1308 - DNA, 25 bp, Artificial Sequence
  Made in the lab
ggaaaggctgggagttcacccatta

SEQ ID NO: 1309 - DNA, 26 bp, Artificial Sequence
  Made in the lab
gggaaaggctgggagttcacccatta

SEQ ID NO: 1310 - DNA, 27 bp, Artificial Sequence
  Made in the lab
ggggaaaggctgggagttcacccatta

SEQ ID NO: 1311 - DNA, 28 bp, Artificial Sequence
  Made in the lab
gggggaaaggctgggagttcacccatta

SEQ ID NO: 1312 - DNA, 29 bp, Artificial Sequence
  Made in the lab
tgggggaaaggctgggagttcacccatta

SEQ ID NO: 1313 - DNA, 30 bp, Artificial Sequence
  Made in the lab
atgggggaaaggctgggagttcacccatta

SEQ ID NO: 1314 - DNA, 21 bp, Artificial Sequence
  Made in the lab
gcaggtggttgagagtgctta

SEQ ID NO: 1315 - DNA, 22 bp, Artificial Sequence
  Made in the lab
agcaggtggttgagagtgctta

SEQ ID NO: 1316 - DNA, 23 bp, Artificial Sequence
  Made in the lab
aagcaggtggttgagagtgctta

SEQ ID NO: 1317 - DNA, 24 bp, Artificial Sequence
  Made in the lab
caagcaggtggttgagagtgctta

SEQ ID NO: 1318 - DNA, 25 bp, Artificial Sequence
  Made in the lab
acaagcaggtggttgagagtgctta

SEQ ID NO: 1319 - DNA, 26 bp, Artificial Sequence
  Made in the lab
cacaagcaggtggttgagagtgctta

SEQ ID NO: 1320 - DNA, 27 bp, Artificial Sequence
  Made in the lab
tcacaagcaggtggttgagagtgctta

SEQ ID NO: 1321 - DNA, 28 bp, Artificial Sequence
  Made in the lab
ttcacaagcaggtggttgagagtgctta

SEQ ID NO: 1322 - DNA, 29 bp, Artificial Sequence
  Made in the lab
gttcacaagcaggtggttgagagtgctta

SEQ ID NO: 1323 - DNA, 30 bp, Artificial Sequence
  Made in the lab
ggttcacaagcaggtggttgagagtgctta

SEQ ID NO: 1324 - DNA, 21 bp, Artificial Sequence
  Made in the lab
gatttggcagagagtataatg

SEQ ID NO: 1325 - DNA, 22 bp, Artificial Sequence
  Made in the lab
agatttggcagagagtataatg

SEQ ID NO: 1326 - DNA, 23 bp, Artificial Sequence
  Made in the lab
cagatttggcagagagtataatg

SEQ ID NO: 1327 - DNA, 24 bp, Artificial Sequence
  Made in the lab
gcagatttggcagagagtataatg

SEQ ID NO: 1328 - DNA, 25 bp, Artificial Sequence
  Made in the lab
agcagatttggcagagagtataatg

SEQ ID NO: 1329 - DNA, 26 bp, Artificial Sequence
  Made in the lab
tagcagatttggcagagagtataatg

SEQ ID NO: 1330 - DNA, 27 bp, Artificial Sequence
  Made in the lab
gtagcagatttggcagagagtataatg

SEQ ID NO: 1331 - DNA, 28 bp, Artificial Sequence
  Made in the lab
tgtagcagatttggcagagagtataatg

SEQ ID NO: 1332 - DNA, 29 bp, Artificial Sequence
  Made in the lab
ctgtagcagatttggcagagagtataatg

SEQ ID NO: 1333 - DNA, 30 bp, Artificial Sequence
  Made in the lab
tctgtagcagatttggcagagagtataatg

SEQ ID NO: 1334 - DNA, 21 bp, Artificial Sequence
  Made in the lab
gggagaaagccgtcttaattt

SEQ ID NO: 1335 - DNA, 22 bp, Artificial Sequence
  Made in the lab
agggagaaagccgtcttaattt

SEQ ID NO: 1336 - DNA, 23 bp, Artificial Sequence
  Made in the lab
gagggagaaagccgtcttaattt

SEQ ID NO: 1337 - DNA, 24 bp, Artificial Sequence
  Made in the lab
agagggagaaagccgtcttaattt

SEQ ID NO: 1338 - DNA, 25 bp, Artificial Sequence
  Made in the lab
aagagggagaaagccgtcttaattt

SEQ ID NO: 1339 - DNA, 26 bp, Artificial Sequence
  Made in the lab
caagagggagaaagccgtcttaattt

SEQ ID NO: 1340 - DNA, 27 bp, Artificial Sequence
  Made in the lab
gcaagagggagaaagccgtcttaattt

SEQ ID NO: 1341 - DNA, 28 bp, Artificial Sequence
  Made in the lab
agcaagagggagaaagccgtcttaattt

SEQ ID NO: 1342 - DNA, 29 bp, Artificial Sequence
  Made in the lab
cagcaagagggagaaagccgtcttaattt

SEQ ID NO: 1343 - DNA, 30 bp, Artificial Sequence
  Made in the lab
tcagcaagagggagaaagccgtcttaattt

SEQ ID NO: 1344 - DNA, 21 bp, Artificial Sequence
  Made in the lab
tgaagaggatcagttgctatg

SEQ ID NO: 1345 - DNA, 22 bp, Artificial Sequence
  Made in the lab
atgaagaggatcagttgctatg

SEQ ID NO: 1346 - DNA, 23 bp, Artificial Sequence
  Made in the lab
catgaagaggatcagttgctatg

SEQ ID NO: 1347 - DNA, 24 bp, Artificial Sequence
  Made in the lab
tcatgaagaggatcagttgctatg

SEQ ID NO: 1348 - DNA, 25 bp, Artificial Sequence
  Made in the lab
ttcatgaagaggatcagttgctatg

SEQ ID NO: 1349 - DNA, 26 bp, Artificial Sequence
  Made in the lab
cttcatgaagaggatcagttgctatg

SEQ ID NO: 1350 - DNA, 27 bp, Artificial Sequence
  Made in the lab
acttcatgaagaggatcagttgctatg

SEQ ID NO: 1351 - DNA, 28 bp, Artificial Sequence
  Made in the lab
gacttcatgaagaggatcagttgctatg

SEQ ID NO: 1352 - DNA, 29 bp, Artificial Sequence
  Made in the lab
cgacttcatgaagaggatcagttgctatg

SEQ ID NO: 1353 - DNA, 30 bp, Artificial Sequence
  Made in the lab
acgacttcatgaagaggatcagttgctatg

SEQ ID NO: 1354 - DNA, 21 bp, Artificial Sequence
  Made in the lab
aagtacaacactgtgctagta

SEQ ID NO: 1355 - DNA, 22 bp, Artificial Sequence
  Made in the lab
aaagtacaacactgtgctagta

SEQ ID NO: 1356 - DNA, 23 bp, Artificial Sequence
  Made in the lab
aaaagtacaacactgtgctagta

SEQ ID NO: 1357 - DNA, 24 bp, Artificial Sequence
  Made in the lab
caaaagtacaacactgtgctagta

SEQ ID NO: 1358 - DNA, 25 bp, Artificial Sequence
  Made in the lab
ccaaaagtacaacactgtgctagta

SEQ ID NO: 1359 - DNA, 26 bp, Artificial Sequence
  Made in the lab
gccaaaagtacaacactgtgctagta

SEQ ID NO: 1360 - DNA, 27 bp, Artificial Sequence
  Made in the lab
tgccaaaagtacaacactgtgctagta

SEQ ID NO: 1361 - DNA, 28 bp, Artificial Sequence
  Made in the lab
ctgccaaaagtacaacactgtgctagta

SEQ ID NO: 1362 - DNA, 29 bp, Artificial Sequence
  Made in the lab
gctgccaaaagtacaacactgtgctagta

SEQ ID NO: 1363 - DNA, 30 bp, Artificial Sequence
  Made in the lab
ggctgccaaaagtacaacactgtgctagta

SEQ ID NO: 1364 - DNA, 21 bp, Artificial Sequence
  Made in the lab
aaagcctcgcatcaacagctt

SEQ ID NO: 1365 - DNA, 22 bp, Artificial Sequence
  Made in the lab
aaaagcctcgcatcaacagctt

SEQ ID NO: 1366 - DNA, 23 bp, Artificial Sequence
  Made in the lab
aaaaagcctcgcatcaacagctt

SEQ ID NO: 1367 - DNA, 24 bp, Artificial Sequence
  Made in the lab
caaaaagcctcgcatcaacagctt

SEQ ID NO: 1368 - DNA, 25 bp, Artificial Sequence
  Made in the lab
ccaaaaagcctcgcatcaacagctt

SEQ ID NO: 1369 - DNA, 26 bp, Artificial Sequence
  Made in the lab
accaaaaagcctcgcatcaacagctt

SEQ ID NO: 1370 - DNA, 27 bp, Artificial Sequence
  Made in the lab
caccaaaaagcctcgcatcaacagctt

SEQ ID NO: 1371 - DNA, 28 bp, Artificial Sequence
  Made in the lab
ccaccaaaaagcctcgcatcaacagctt

SEQ ID NO: 1372 - DNA, 29 bp, Artificial Sequence
  Made in the lab
cccaccaaaaagcctcgcatcaacagctt

SEQ ID NO: 1373 - DNA, 30 bp, Artificial Sequence
  Made in the lab
acccaccaaaaagcctcgcatcaacagctt

SEQ ID NO: 1374 - DNA, 21 bp, Artificial Sequence
  Made in the lab
cgaactgtctgtcacattttc

SEQ ID NO: 1375 - DNA, 22 bp, Artificial Sequence
  Made in the lab
acgaactgtctgtcacattttc

SEQ ID NO: 1376 - DNA, 23 bp, Artificial Sequence
  Made in the lab
tacgaactgtctgtcacattttc

SEQ ID NO: 1377 - DNA, 24 bp, Artificial Sequence
  Made in the lab
ctacgaactgtctgtcacattttc

SEQ ID NO: 1378 - DNA, 25 bp, Artificial Sequence
  Made in the lab
tctacgaactgtctgtcacattttc

SEQ ID NO: 1379 - DNA, 26 bp, Artificial Sequence
  Made in the lab
gtctacgaactgtctgtcacattttc

SEQ ID NO: 1380 - DNA, 27 bp, Artificial Sequence
  Made in the lab
tgtctacgaactgtctgtcacattttc

SEQ ID NO: 1381 - DNA, 28 bp, Artificial Sequence
  Made in the lab
ctgtctacgaactgtctgtcacattttc

SEQ ID NO: 1382 - DNA, 29 bp, Artificial Sequence
  Made in the lab
cctgtctacgaactgtctgtcacattttc

SEQ ID NO: 1383 - DNA, 30 bp, Artificial Sequence
  Made in the lab
gcctgtctacgaactgtctgtcacattttc

SEQ ID NO: 1384 - DNA, 21 bp, Artificial Sequence
  Made in the lab
atgactttaaggcgtttttca

SEQ ID NO: 1385 - DNA, 22 bp, Artificial Sequence
  Made in the lab
aatgactttaaggcgtttttca

SEQ ID NO: 1386 - DNA, 23 bp, Artificial Sequence
  Made in the lab
aaatgactttaaggcgtttttca

SEQ ID NO: 1387 - DNA, 24 bp, Artificial Sequence
  Made in the lab
aaaatgactttaaggcgtttttca

SEQ ID NO: 1388 - DNA, 25 bp, Artificial Sequence
  Made in the lab
gaaaatgactttaaggcgtttttca

SEQ ID NO: 1389 - DNA, 26 bp, Artificial Sequence
  Made in the lab
agaaaatgactttaaggcgtttttca

SEQ ID NO: 1390 - DNA, 27 bp, Artificial Sequence
  Made in the lab
aagaaaatgactttaaggcgtttttca

SEQ ID NO: 1391 - DNA, 28 bp, Artificial Sequence
  Made in the lab
aaagaaaatgactttaaggcgtttttca

SEQ ID NO: 1392 - DNA, 29 bp, Artificial Sequence
  Made in the lab
caaagaaaatgactttaaggcgtttttca

SEQ ID NO: 1393 - DNA, 30 bp, Artificial Sequence
  Made in the lab
ccaaagaaaatgactttaaggcgtttttca

SEQ ID NO: 1394 - DNA, 21 bp, Artificial Sequence
  Made in the lab
gtacaacactgtgctagtact

SEQ ID NO: 1395 - DNA, 22 bp, Artificial Sequence
  Made in the lab
agtacaacactgtgctagtact

SEQ ID NO: 1396 - DNA, 23 bp, Artificial Sequence
  Made in the lab
aagtacaacactgtgctagtact

SEQ ID NO: 1397 - DNA, 24 bp, Artificial Sequence
  Made in the lab
aaagtacaacactgtgctagtact

SEQ ID NO: 1398 - DNA, 25 bp, Artificial Sequence
  Made in the lab
aaaagtacaacactgtgctagtact

SEQ ID NO: 1399 - DNA, 26 bp, Artificial Sequence
  Made in the lab
caaaagtacaacactgtgctagtact

SEQ ID NO: 1400 - DNA, 27 bp, Artificial Sequence
  Made in the lab
ccaaaagtacaacactgtgctagtact

SEQ ID NO: 1401 - DNA, 28 bp, Artificial Sequence
  Made in the lab
gccaaaagtacaacactgtgctagtact

SEQ ID NO: 1402 - DNA, 29 bp, Artificial Sequence
  Made in the lab
tgccaaaagtacaacactgtgctagtact

SEQ ID NO: 1403 - DNA, 30 bp, Artificial Sequence
  Made in the lab
ctgccaaaagtacaacactgtgctagtact

SEQ ID NO: 1404 - DNA, 21 bp, Artificial Sequence
  Made in the lab
aatctccagcccggattacaa

SEQ ID NO: 1405 - DNA, 22 bp, Artificial Sequence
  Made in the lab
aaatctccagcccggattacaa

SEQ ID NO: 1406 - DNA, 23 bp, Artificial Sequence
  Made in the lab
aaaatctccagcccggattacaa

SEQ ID NO: 1407 - DNA, 24 bp, Artificial Sequence
  Made in the lab
taaaatctccagcccggattacaa

SEQ ID NO: 1408 - DNA, 25 bp, Artificial Sequence
  Made in the lab
ttaaaatctccagcccggattacaa

SEQ ID NO: 1409 - DNA, 26 bp, Artificial Sequence
  Made in the lab
gttaaaatctccagcccggattacaa

SEQ ID NO: 1410 - DNA, 27 bp, Artificial Sequence
  Made in the lab
agttaaaatctccagcccggattacaa

SEQ ID NO: 1411 - DNA, 28 bp, Artificial Sequence
  Made in the lab
aagttaaaatctccagcccggattacaa

SEQ ID NO: 1412 - DNA, 29 bp, Artificial Sequence
  Made in the lab
gaagttaaaatctccagcccggattacaa

SEQ ID NO: 1413 - DNA, 30 bp, Artificial Sequence
  Made in the lab
ggaagttaaaatctccagcccggattacaa

SEQ ID NO: 1414 - DNA, 21 bp, Artificial Sequence
  Made in the lab
aagcctcgcatcaacagcttt

SEQ ID NO: 1415 - DNA, 22 bp, Artificial Sequence
  Made in the lab
aaagcctcgcatcaacagcttt

SEQ ID NO: 1416 - DNA, 23 bp, Artificial Sequence
  Made in the lab
aaaagcctcgcatcaacagcttt

SEQ ID NO: 1417 - DNA, 24 bp, Artificial Sequence
  Made in the lab
aaaaagcctcgcatcaacagcttt

SEQ ID NO: 1418 - DNA, 25 bp, Artificial Sequence
  Made in the lab
caaaaagcctcgcatcaacagcttt

SEQ ID NO: 1419 - DNA, 26 bp, Artificial Sequence
  Made in the lab
ccaaaaagcctcgcatcaacagcttt

SEQ ID NO: 1420 - DNA, 27 bp, Artificial Sequence
  Made in the lab
accaaaaagcctcgcatcaacagcttt

SEQ ID NO: 1421 - DNA, 28 bp, Artificial Sequence
  Made in the lab
caccaaaaagcctcgcatcaacagcttt

SEQ ID NO: 1422 - DNA, 29 bp, Artificial Sequence
  Made in the lab
ccaccaaaaagcctcgcatcaacagcttt

SEQ ID NO: 1423 - DNA, 30 bp, Artificial Sequence
  Made in the lab
cccaccaaaaagcctcgcatcaacagcttt

SEQ ID NO: 1424 - DNA, 21 bp, Artificial Sequence
  Made in the lab
caatgaggaagccatgaaagt

SEQ ID NO: 1425 - DNA, 22 bp, Artificial Sequence
  Made in the lab
acaatgaggaagccatgaaagt

SEQ ID NO: 1426 - DNA, 23 bp, Artificial Sequence
  Made in the lab
gacaatgaggaagccatgaaagt

SEQ ID NO: 1427 - DNA, 24 bp, Artificial Sequence
  Made in the lab
cgacaatgaggaagccatgaaagt

SEQ ID NO: 1428 - DNA, 25 bp, Artificial Sequence
  Made in the lab
ccgacaatgaggaagccatgaaagt

SEQ ID NO: 1429 - DNA, 26 bp, Artificial Sequence
  Made in the lab
cccgacaatgaggaagccatgaaagt

SEQ ID NO: 1430 - DNA, 27 bp, Artificial Sequence
  Made in the lab
ccccgacaatgaggaagccatgaaagt

SEQ ID NO: 1431 - DNA, 28 bp, Artificial Sequence
  Made in the lab
gccccgacaatgaggaagccatgaaagt

SEQ ID NO: 1432 - DNA, 29 bp, Artificial Sequence
  Made in the lab
cgccccgacaatgaggaagccatgaaagt

SEQ ID NO: 1433 - DNA, 30 bp, Artificial Sequence
  Made in the lab
ccgccccgacaatgaggaagccatgaaagt

SEQ ID NO: 1434 - DNA, 21 bp, Artificial Sequence
  Made in the lab
ggagacacatgatccttcatt

SEQ ID NO: 1435 - DNA, 22 bp, Artificial Sequence
  Made in the lab
aggagacacatgatccttcatt

SEQ ID NO: 1436 - DNA, 23 bp, Artificial Sequence
  Made in the lab
gaggagacacatgatccttcatt

SEQ ID NO: 1437 - DNA, 24 bp, Artificial Sequence
  Made in the lab
agaggagacacatgatccttcatt

SEQ ID NO: 1438 - DNA, 25 bp, Artificial Sequence
  Made in the lab
gagaggagacacatgatccttcatt

SEQ ID NO: 1439 - DNA, 26 bp, Artificial Sequence
  Made in the lab
agagaggagacacatgatccttcatt

SEQ ID NO: 1440 - DNA, 27 bp, Artificial Sequence
  Made in the lab
gagagaggagacacatgatccttcatt

SEQ ID NO: 1441 - DNA, 28 bp, Artificial Sequence
  Made in the lab
agagagaggagacacatgatccttcatt

SEQ ID NO: 1442 - DNA, 29 bp, Artificial Sequence
  Made in the lab
tagagagaggagacacatgatccttcatt

SEQ ID NO: 1443 - DNA, 30 bp, Artificial Sequence
  Made in the lab
ctagagagaggagacacatgatccttcatt

SEQ ID NO: 1444 - DNA, 21 bp, Artificial Sequence
  Made in the lab
tcgtgtactacctgatgaaca

SEQ ID NO: 1445 - DNA, 22 bp, Artificial Sequence
  Made in the lab
atcgtgtactacctgatgaaca

SEQ ID NO: 1446 - DNA, 23 bp, Artificial Sequence
  Made in the lab
catcgtgtactacctgatgaaca

SEQ ID NO: 1447 - DNA, 24 bp, Artificial Sequence
  Made in the lab
gcatcgtgtactacctgatgaaca

SEQ ID NO: 1448 - DNA, 25 bp, Artificial Sequence
  Made in the lab
cgcatcgtgtactacctgatgaaca

SEQ ID NO: 1449 - DNA, 26 bp, Artificial Sequence
  Made in the lab
ccgcatcgtgtactacctgatgaaca

SEQ ID NO: 1450 - DNA, 27 bp, Artificial Sequence
  Made in the lab
gccgcatcgtgtactacctgatgaaca

SEQ ID NO: 1451 - DNA, 28 bp, Artificial Sequence
  Made in the lab
agccgcatcgtgtactacctgatgaaca

SEQ ID NO: 1452 - DNA, 29 bp, Artificial Sequence
  Made in the lab
gagccgcatcgtgtactacctgatgaaca

SEQ ID NO: 1453 - DNA, 30 bp, Artificial Sequence
  Made in the lab
agagccgcatcgtgtactacctgatgaaca

SEQ ID NO: 1454 - DNA, 21 bp, Artificial Sequence
  Made in the lab
caacactgtgctagtactagt

SEQ ID NO: 1455 - DNA, 22 bp, Artificial Sequence
  Made in the lab
acaacactgtgctagtactagt

SEQ ID NO: 1456 - DNA, 23 bp, Artificial Sequence
  Made in the lab
tacaacactgtgctagtactagt

SEQ ID NO: 1457 - DNA, 24 bp, Artificial Sequence
  Made in the lab
gtacaacactgtgctagtactagt

SEQ ID NO: 1458 - DNA, 25 bp, Artificial Sequence
  Made in the lab
agtacaacactgtgctagtactagt

SEQ ID NO: 1459 - DNA, 26 bp, Artificial Sequence
  Made in the lab
aagtacaacactgtgctagtactagt

SEQ ID NO: 1460 - DNA, 27 bp, Artificial Sequence
  Made in the lab
aaagtacaacactgtgctagtactagt

SEQ ID NO: 1461 - DNA, 28 bp, Artificial Sequence
  Made in the lab
aaaagtacaacactgtgctagtactagt

SEQ ID NO: 1462 - DNA, 29 bp, Artificial Sequence
  Made in the lab
caaaagtacaacactgtgctagtactagt

SEQ ID NO: 1463 - DNA, 30 bp, Artificial Sequence
  Made in the lab
ccaaaagtacaacactgtgctagtactagt

SEQ ID NO: 1464 - DNA, 21 bp, Artificial Sequence
  Made in the lab
agacctacatctccaagaagc

SEQ ID NO: 1465 - DNA, 22 bp, Artificial Sequence
  Made in the lab
aagacctacatctccaagaagc

SEQ ID NO: 1466 - DNA, 23 bp, Artificial Sequence
  Made in the lab
caagacctacatctccaagaagc

SEQ ID NO: 1467 - DNA, 24 bp, Artificial Sequence
  Made in the lab
gcaagacctacatctccaagaagc

SEQ ID NO: 1468 - DNA, 25 bp, Artificial Sequence
  Made in the lab
ggcaagacctacatctccaagaagc

SEQ ID NO: 1469 - DNA, 26 bp, Artificial Sequence
  Made in the lab
gggcaagacctacatctccaagaagc

SEQ ID NO: 1470 - DNA, 27 bp, Artificial Sequence
  Made in the lab
ggggcaagacctacatctccaagaagc

SEQ ID NO: 1471 - DNA, 28 bp, Artificial Sequence
  Made in the lab
cggggcaagacctacatctccaagaagc

SEQ ID NO: 1472 - DNA, 29 bp, Artificial Sequence
  Made in the lab
ccggggcaagacctacatctccaagaagc

SEQ ID NO: 1473 - DNA, 30 bp, Artificial Sequence
  Made in the lab
cccggggcaagacctacatctccaagaagc

SEQ ID NO: 1474 - DNA, 21 bp, Artificial Sequence
  Made in the lab
tgaaagtccggaagcaatgtg

SEQ ID NO: 1475 - DNA, 22 bp, Artificial Sequence
  Made in the lab
atgaaagtccggaagcaatgtg

SEQ ID NO: 1476 - DNA, 23 bp, Artificial Sequence
  Made in the lab
catgaaagtccggaagcaatgtg

SEQ ID NO: 1477 - DNA, 24 bp, Artificial Sequence
  Made in the lab
ccatgaaagtccggaagcaatgtg

SEQ ID NO: 1478 - DNA, 25 bp, Artificial Sequence
  Made in the lab
gccatgaaagtccggaagcaatgtg

SEQ ID NO: 1479 - DNA, 26 bp, Artificial Sequence
  Made in the lab
agccatgaaagtccggaagcaatgtg

SEQ ID NO: 1480 - DNA, 27 bp, Artificial Sequence
  Made in the lab
aagccatgaaagtccggaagcaatgtg

SEQ ID NO: 1481 - DNA, 28 bp, Artificial Sequence
  Made in the lab
gaagccatgaaagtccggaagcaatgtg

SEQ ID NO: 1482 - DNA, 29 bp, Artificial Sequence
  Made in the lab
ggaagccatgaaagtccggaagcaatgtg

SEQ ID NO: 1483 - DNA, 30 bp, Artificial Sequence
  Made in the lab
aggaagccatgaaagtccggaagcaatgtg

SEQ ID NO: 1484 - DNA, 21 bp, Artificial Sequence
  Made in the lab
gaggctgccaaaagtacaaca

SEQ ID NO: 1485 - DNA, 22 bp, Artificial Sequence
  Made in the lab
agaggctgccaaaagtacaaca

SEQ ID NO: 1486 - DNA, 23 bp, Artificial Sequence
  Made in the lab
cagaggctgccaaaagtacaaca

SEQ ID NO: 1487 - DNA, 24 bp, Artificial Sequence
  Made in the lab
tcagaggctgccaaaagtacaaca

SEQ ID NO: 1488 - DNA, 25 bp, Artificial Sequence
  Made in the lab
gtcagaggctgccaaaagtacaaca

SEQ ID NO: 1489 - DNA, 26 bp, Artificial Sequence
  Made in the lab
ggtcagaggctgccaaaagtacaaca

SEQ ID NO: 1490 - DNA, 27 bp, Artificial Sequence
  Made in the lab
aggtcagaggctgccaaaagtacaaca

SEQ ID NO: 1491 - DNA, 28 bp, Artificial Sequence
  Made in the lab
gaggtcagaggctgccaaaagtacaaca

SEQ ID NO: 1492 - DNA, 29 bp, Artificial Sequence
  Made in the lab
agaggtcagaggctgccaaaagtacaaca

SEQ ID NO: 1493 - DNA, 30 bp, Artificial Sequence
  Made in the lab
gagaggtcagaggctgccaaaagtacaaca

SEQ ID NO: 1494 - DNA, 21 bp, Artificial Sequence
  Made in the lab
gtcagacctttctcttagacc

SEQ ID NO: 1495 - DNA, 22 bp, Artificial Sequence
  Made in the lab
agtcagacctttctcttagacc

SEQ ID NO: 1496 - DNA, 23 bp, Artificial Sequence
  Made in the lab
tagtcagacctttctcttagacc

SEQ ID NO: 1497 - DNA, 24 bp, Artificial Sequence
  Made in the lab
ctagtcagacctttctcttagacc

SEQ ID NO: 1498 - DNA, 25 bp, Artificial Sequence
  Made in the lab
actagtcagacctttctcttagacc

SEQ ID NO: 1499 - DNA, 26 bp, Artificial Sequence
  Made in the lab
tactagtcagacctttctcttagacc

SEQ ID NO: 1500 - DNA, 27 bp, Artificial Sequence
  Made in the lab
gtactagtcagacctttctcttagacc

SEQ ID NO: 1501 - DNA, 28 bp, Artificial Sequence
  Made in the lab
agtactagtcagacctttctcttagacc

SEQ ID NO: 1502 - DNA, 29 bp, Artificial Sequence
  Made in the lab
tagtactagtcagacctttctcttagacc

SEQ ID NO: 1503 - DNA, 30 bp, Artificial Sequence
  Made in the lab
ctagtactagtcagacctttctcttagacc

SEQ ID NO: 1504 - DNA, 21 bp, Artificial Sequence
  Made in the lab
tcaacagctttgaggagcatg

SEQ ID NO: 1505 - DNA, 22 bp, Artificial Sequence
  Made in the lab
atcaacagctttgaggagcatg

SEQ ID NO: 1506 - DNA, 23 bp, Artificial Sequence
  Made in the lab
catcaacagctttgaggagcatg

SEQ ID NO: 1507 - DNA, 24 bp, Artificial Sequence
  Made in the lab
gcatcaacagctttgaggagcatg

SEQ ID NO: 1508 - DNA, 25 bp, Artificial Sequence
  Made in the lab
cgcatcaacagctttgaggagcatg

SEQ ID NO: 1509 - DNA, 26 bp, Artificial Sequence
  Made in the lab
tcgcatcaacagctttgaggagcatg

SEQ ID NO: 1510 - DNA, 27 bp, Artificial Sequence
  Made in the lab
ctcgcatcaacagctttgaggagcatg

SEQ ID NO: 1511 - DNA, 28 bp, Artificial Sequence
  Made in the lab
cctcgcatcaacagctttgaggagcatg

SEQ ID NO: 1512 - DNA, 29 bp, Artificial Sequence
  Made in the lab
gcctcgcatcaacagctttgaggagcatg

SEQ ID NO: 1513 - DNA, 30 bp, Artificial Sequence
  Made in the lab
agcctcgcatcaacagctttgaggagcatg

SEQ ID NO: 1514 - DNA, 21 bp, Artificial Sequence
  Made in the lab
gggacttgtcgctgatcaagg

SEQ ID NO: 1515 - DNA, 22 bp, Artificial Sequence
  Made in the lab
agggacttgtcgctgatcaagg

SEQ ID NO: 1516 - DNA, 23 bp, Artificial Sequence
  Made in the lab
cagggacttgtcgctgatcaagg

SEQ ID NO: 1517 - DNA, 24 bp, Artificial Sequence
  Made in the lab
acagggacttgtcgctgatcaagg

SEQ ID NO: 1518 - DNA, 25 bp, Artificial Sequence
  Made in the lab
gacagggacttgtcgctgatcaagg

SEQ ID NO: 1519 - DNA, 26 bp, Artificial Sequence
  Made in the lab
cgacagggacttgtcgctgatcaagg

SEQ ID NO: 1520 - DNA, 27 bp, Artificial Sequence
  Made in the lab
gcgacagggacttgtcgctgatcaagg

SEQ ID NO: 1521 - DNA, 28 bp, Artificial Sequence
  Made in the lab
tgcgacagggacttgtcgctgatcaagg

SEQ ID NO: 1522 - DNA, 29 bp, Artificial Sequence
  Made in the lab
atgcgacagggacttgtcgctgatcaagg

SEQ ID NO: 1523 - DNA, 30 bp, Artificial Sequence
  Made in the lab
aatgcgacagggacttgtcgctgatcaagg

SEQ ID NO: 1524 - DNA, 21 bp, Artificial Sequence
  Made in the lab
gccccgaacccaccaaaaagc

SEQ ID NO: 1525 - DNA, 22 bp, Artificial Sequence
  Made in the lab
agccccgaacccaccaaaaagc

SEQ ID NO: 1526 - DNA, 23 bp, Artificial Sequence
  Made in the lab
cagccccgaacccaccaaaaagc

SEQ ID NO: 1527 - DNA, 24 bp, Artificial Sequence
  Made in the lab
ccagccccgaacccaccaaaaagc

SEQ ID NO: 1528 - DNA, 25 bp, Artificial Sequence
  Made in the lab
gccagccccgaacccaccaaaaagc

SEQ ID NO: 1529 - DNA, 26 bp, Artificial Sequence
  Made in the lab
agccagccccgaacccaccaaaaagc

SEQ ID NO: 1530 - DNA, 27 bp, Artificial Sequence
  Made in the lab
tagccagccccgaacccaccaaaaagc

SEQ ID NO: 1531 - DNA, 28 bp, Artificial Sequence
  Made in the lab
ctagccagccccgaacccaccaaaaagc

SEQ ID NO: 1532 - DNA, 29 bp, Artificial Sequence
  Made in the lab
gctagccagccccgaacccaccaaaaagc

SEQ ID NO: 1533 - DNA, 30 bp, Artificial Sequence
  Made in the lab
cgctagccagccccgaacccaccaaaaagc

SEQ ID NO: 1534 - DNA, 21 bp, Artificial Sequence
  Made in the lab
cctcatggtgctgagatttgc

SEQ ID NO: 1535 - DNA, 22 bp, Artificial Sequence
  Made in the lab
acctcatggtgctgagatttgc

SEQ ID NO: 1536 - DNA, 23 bp, Artificial Sequence
  Made in the lab
aacctcatggtgctgagatttgc

SEQ ID NO: 1537 - DNA, 24 bp, Artificial Sequence
  Made in the lab
gaacctcatggtgctgagatttgc

SEQ ID NO: 1538 - DNA, 25 bp, Artificial Sequence
  Made in the lab
agaacctcatggtgctgagatttgc

SEQ ID NO: 1539 - DNA, 26 bp, Artificial Sequence
  Made in the lab
cagaacctcatggtgctgagatttgc

SEQ ID NO: 1540 - DNA, 27 bp, Artificial Sequence
  Made in the lab
gcagaacctcatggtgctgagatttgc

SEQ ID NO: 1541 - DNA, 28 bp, Artificial Sequence
  Made in the lab
tgcagaacctcatggtgctgagatttgc

SEQ ID NO: 1542 - DNA, 29 bp, Artificial Sequence
  Made in the lab
gtgcagaacctcatggtgctgagatttgc

SEQ ID NO: 1543 - DNA, 30 bp, Artificial Sequence
  Made in the lab
ggtgcagaacctcatggtgctgagatttgc

SEQ ID NO: 1544 - DNA, 21 bp, Artificial Sequence
  Made in the lab
gctcaagctggaggacttctt

SEQ ID NO: 1545 - DNA, 22 bp, Artificial Sequence
  Made in the lab
agctcaagctggaggacttctt

SEQ ID NO: 1546 - DNA, 23 bp, Artificial Sequence
  Made in the lab
aagctcaagctggaggacttctt

SEQ ID NO: 1547 - DNA, 24 bp, Artificial Sequence
  Made in the lab
gaagctcaagctggaggacttctt

SEQ ID NO: 1548 - DNA, 25 bp, Artificial Sequence
  Made in the lab
agaagctcaagctggaggacttctt

SEQ ID NO: 1549 - DNA, 26 bp, Artificial Sequence
  Made in the lab
gagaagctcaagctggaggacttctt

SEQ ID NO: 1550 - DNA, 27 bp, Artificial Sequence
  Made in the lab
ggagaagctcaagctggaggacttctt

SEQ ID NO: 1551 - DNA, 28 bp, Artificial Sequence
  Made in the lab
aggagaagctcaagctggaggacttctt

SEQ ID NO: 1552 - DNA, 29 bp, Artificial Sequence
  Made in the lab
gaggagaagctcaagctggaggacttctt

SEQ ID NO: 1553 - DNA, 30 bp, Artificial Sequence
  Made in the lab
agaggagaagctcaagctggaggacttctt

SEQ ID NO: 1554 - DNA, 21 bp, Artificial Sequence
  Made in the lab
ctcctatgtggctggccagta

SEQ ID NO: 1555 - DNA, 22 bp, Artificial Sequence
  Made in the lab
actcctatgtggctggccagta

SEQ ID NO: 1556 - DNA, 23 bp, Artificial Sequence
  Made in the lab
aactcctatgtggctggccagta

SEQ ID NO: 1557 - DNA, 24 bp, Artificial Sequence
  Made in the lab
caactcctatgtggctggccagta

SEQ ID NO: 1558 - DNA, 25 bp, Artificial Sequence
  Made in the lab
gcaactcctatgtggctggccagta

SEQ ID NO: 1559 - DNA, 26 bp, Artificial Sequence
  Made in the lab
cgcaactcctatgtggctggccagta

SEQ ID NO: 1560 - DNA, 27 bp, Artificial Sequence
  Made in the lab
ccgcaactcctatgtggctggccagta

SEQ ID NO: 1561 - DNA, 28 bp, Artificial Sequence
  Made in the lab
cccgcaactcctatgtggctggccagta

SEQ ID NO: 1562 - DNA, 29 bp, Artificial Sequence
  Made in the lab
gcccgcaactcctatgtggctggccagta

SEQ ID NO: 1563 - DNA, 30 bp, Artificial Sequence
  Made in the lab
tgcccgcaactcctatgtggctggccagta

SEQ ID NO: 1564 - DNA, 21 bp, Artificial Sequence
  Made in the lab
ccacctactgcagatgctgtg

SEQ ID NO: 1565 - DNA, 22 bp, Artificial Sequence
  Made in the lab
accacctactgcagatgctgtg

SEQ ID NO: 1566 - DNA, 23 bp, Artificial Sequence
  Made in the lab
aaccacctactgcagatgctgtg

SEQ ID NO: 1567 - DNA, 24 bp, Artificial Sequence
  Made in the lab
gaaccacctactgcagatgctgtg

SEQ ID NO: 1568 - DNA, 25 bp, Artificial Sequence
  Made in the lab
agaaccacctactgcagatgctgtg

SEQ ID NO: 1569 - DNA, 26 bp, Artificial Sequence
  Made in the lab
cagaaccacctactgcagatgctgtg

SEQ ID NO: 1570 - DNA, 27 bp, Artificial Sequence
  Made in the lab
gcagaaccacctactgcagatgctgtg

SEQ ID NO: 1571 - DNA, 28 bp, Artificial Sequence
  Made in the lab
tgcagaaccacctactgcagatgctgtg

SEQ ID NO: 1572 - DNA, 29 bp, Artificial Sequence
  Made in the lab
atgcagaaccacctactgcagatgctgtg

SEQ ID NO: 1573 - DNA, 30 bp, Artificial Sequence
  Made in the lab
gatgcagaaccacctactgcagatgctgtg

SEQ ID NO: 1574 - DNA, 21 bp, Artificial Sequence
  Made in the lab
ggaaggaggagggcgcccatt

SEQ ID NO: 1575 - DNA, 22 bp, Artificial Sequence
  Made in the lab
aggaaggaggagggcgcccatt

SEQ ID NO: 1576 - DNA, 23 bp, Artificial Sequence
  Made in the lab
aaggaaggaggagggcgcccatt

SEQ ID NO: 1577 - DNA, 24 bp, Artificial Sequence
  Made in the lab
gaaggaaggaggagggcgcccatt

SEQ ID NO: 1578 - DNA, 25 bp, Artificial Sequence
  Made in the lab
agaaggaaggaggagggcgcccatt

SEQ ID NO: 1579 - DNA, 26 bp, Artificial Sequence
  Made in the lab
cagaaggaaggaggagggcgcccatt

SEQ ID NO: 1580 - DNA, 27 bp, Artificial Sequence
  Made in the lab
acagaaggaaggaggagggcgcccatt

SEQ ID NO: 1581 - DNA, 28 bp, Artificial Sequence
  Made in the lab
aacagaaggaaggaggagggcgcccatt

SEQ ID NO: 1582 - DNA, 29 bp, Artificial Sequence
  Made in the lab
caacagaaggaaggaggagggcgcccatt

SEQ ID NO: 1583 - DNA, 30 bp, Artificial Sequence
  Made in the lab
ccaacagaaggaaggaggagggcgcccatt

SEQ ID NO: 1584 - DNA, 21 bp, Artificial Sequence
  Made in the lab
acctcatggtgctgagatttg

SEQ ID NO: 1585 - DNA, 22 bp, Artificial Sequence
  Made in the lab
aacctcatggtgctgagatttg

SEQ ID NO: 1586 - DNA, 23 bp, Artificial Sequence
  Made in the lab
gaacctcatggtgctgagatttg

SEQ ID NO: 1587 - DNA, 24 bp, Artificial Sequence
  Made in the lab
agaacctcatggtgctgagatttg

SEQ ID NO: 1588 - DNA, 25 bp, Artificial Sequence
  Made in the lab
cagaacctcatggtgctgagatttg

SEQ ID NO: 1589 - DNA, 26 bp, Artificial Sequence
  Made in the lab
gcagaacctcatggtgctgagatttg

SEQ ID NO: 1590 - DNA, 27 bp, Artificial Sequence
  Made in the lab
tgcagaacctcatggtgctgagatttg

SEQ ID NO: 1591 - DNA, 28 bp, Artificial Sequence
  Made in the lab
gtgcagaacctcatggtgctgagatttg

SEQ ID NO: 1592 - DNA, 29 bp, Artificial Sequence
  Made in the lab
ggtgcagaacctcatggtgctgagatttg

SEQ ID NO: 1593 - DNA, 30 bp, Artificial Sequence
  Made in the lab
tggtgcagaacctcatggtgctgagatttg

SEQ ID NO: 1594 - DNA, 21 bp, Artificial Sequence
  Made in the lab
gaacattcacgagtcctgcat

SEQ ID NO: 1595 - DNA, 22 bp, Artificial Sequence
  Made in the lab
agaacattcacgagtcctgcat

SEQ ID NO: 1596 - DNA, 23 bp, Artificial Sequence
  Made in the lab
aagaacattcacgagtcctgcat

SEQ ID NO: 1597 - DNA, 24 bp, Artificial Sequence
  Made in the lab
caagaacattcacgagtcctgcat

SEQ ID NO: 1598 - DNA, 25 bp, Artificial Sequence
  Made in the lab
ccaagaacattcacgagtcctgcat

SEQ ID NO: 1599 - DNA, 26 bp, Artificial Sequence
  Made in the lab
accaagaacattcacgagtcctgcat

SEQ ID NO: 1600 - DNA, 27 bp, Artificial Sequence
  Made in the lab
caccaagaacattcacgagtcctgcat

SEQ ID NO: 1601 - DNA, 28 bp, Artificial Sequence
  Made in the lab
tcaccaagaacattcacgagtcctgcat

SEQ ID NO: 1602 - DNA, 29 bp, Artificial Sequence
  Made in the lab
gtcaccaagaacattcacgagtcctgcat

SEQ ID NO: 1603 - DNA, 30 bp, Artificial Sequence
  Made in the lab
cgtcaccaagaacattcacgagtcctgcat

SEQ ID NO: 1604 - DNA, 21 bp, Artificial Sequence
  Made in the lab
cctcaatgccctgccattaaa

SEQ ID NO: 1605 - DNA, 22 bp, Artificial Sequence
  Made in the lab
acctcaatgccctgccattaaa

SEQ ID NO: 1606 - DNA, 23 bp, Artificial Sequence
  Made in the lab
aacctcaatgccctgccattaaa

SEQ ID NO: 1607 - DNA, 24 bp, Artificial Sequence
  Made in the lab
caacctcaatgccctgccattaaa

SEQ ID NO: 1608 - DNA, 25 bp, Artificial Sequence
  Made in the lab
ccaacctcaatgccctgccattaaa

SEQ ID NO: 1609 - DNA, 26 bp, Artificial Sequence
  Made in the lab
cccaacctcaatgccctgccattaaa

SEQ ID NO: 1610 - DNA, 27 bp, Artificial Sequence
  Made in the lab
tcccaacctcaatgccctgccattaaa

SEQ ID NO: 1611 - DNA, 28 bp, Artificial Sequence
  Made in the lab
ctcccaacctcaatgccctgccattaaa

SEQ ID NO: 1612 - DNA, 29 bp, Artificial Sequence
  Made in the lab
cctcccaacctcaatgccctgccattaaa

SEQ ID NO: 1613 - DNA, 30 bp, Artificial Sequence
  Made in the lab
ccctcccaacctcaatgccctgccattaaa

SEQ ID NO: 1614 - DNA, 21 bp, Artificial Sequence
  Made in the lab
gaagatctaccccaccatctg

SEQ ID NO: 1615 - DNA, 22 bp, Artificial Sequence
  Made in the lab
agaagatctaccccaccatctg

SEQ ID NO: 1616 - DNA, 23 bp, Artificial Sequence
  Made in the lab
aagaagatctaccccaccatctg

SEQ ID NO: 1617 - DNA, 24 bp, Artificial Sequence
  Made in the lab
gaagaagatctaccccaccatctg

SEQ ID NO: 1618 - DNA, 25 bp, Artificial Sequence
  Made in the lab
agaagaagatctaccccaccatctg

SEQ ID NO: 1619 - DNA, 26 bp, Artificial Sequence
  Made in the lab
aagaagaagatctaccccaccatctg

SEQ ID NO: 1620 - DNA, 27 bp, Artificial Sequence
  Made in the lab
caagaagaagatctaccccaccatctg

SEQ ID NO: 1621 - DNA, 28 bp, Artificial Sequence
  Made in the lab
ccaagaagaagatctaccccaccatctg

SEQ ID NO: 1622 - DNA, 29 bp, Artificial Sequence
  Made in the lab
gccaagaagaagatctaccccaccatctg

SEQ ID NO: 1623 - DNA, 30 bp, Artificial Sequence
  Made in the lab
ggccaagaagaagatctaccccaccatctg

SEQ ID NO: 1624 - DNA, 21 bp, Artificial Sequence
  Made in the lab
ctcagatgacgtccgtgatga

SEQ ID NO: 1625 - DNA, 22 bp, Artificial Sequence
  Made in the lab
actcagatgacgtccgtgatga

SEQ ID NO: 1626 - DNA, 23 bp, Artificial Sequence
  Made in the lab
aactcagatgacgtccgtgatga

SEQ ID NO: 1627 - DNA, 24 bp, Artificial Sequence
  Made in the lab
caactcagatgacgtccgtgatga

SEQ ID NO: 1628 - DNA, 25 bp, Artificial Sequence
  Made in the lab
ccaactcagatgacgtccgtgatga

SEQ ID NO: 1629 - DNA, 26 bp, Artificial Sequence
  Made in the lab
accaactcagatgacgtccgtgatga

SEQ ID NO: 1630 - DNA, 27 bp, Artificial Sequence
  Made in the lab
caccaactcagatgacgtccgtgatga

SEQ ID NO: 1631 - DNA, 28 bp, Artificial Sequence
  Made in the lab
ccaccaactcagatgacgtccgtgatga

SEQ ID NO: 1632 - DNA, 29 bp, Artificial Sequence
  Made in the lab
tccaccaactcagatgacgtccgtgatga

SEQ ID NO: 1633 - DNA, 30 bp, Artificial Sequence
  Made in the lab
ctccaccaactcagatgacgtccgtgatga

SEQ ID NO: 1634 - DNA, 21 bp, Artificial Sequence
  Made in the lab
gatctaccccaccatctggtg

SEQ ID NO: 1635 - DNA, 22 bp, Artificial Sequence
  Made in the lab
agatctaccccaccatctggtg

SEQ ID NO: 1636 - DNA, 23 bp, Artificial Sequence
  Made in the lab
aagatctaccccaccatctggtg

SEQ ID NO: 1637 - DNA, 24 bp, Artificial Sequence
  Made in the lab
gaagatctaccccaccatctggtg

SEQ ID NO: 1638 - DNA, 25 bp, Artificial Sequence
  Made in the lab
agaagatctaccccaccatctggtg

SEQ ID NO: 1639 - DNA, 26 bp, Artificial Sequence
  Made in the lab
aagaagatctaccccaccatctggtg

SEQ ID NO: 1640 - DNA, 27 bp, Artificial Sequence
  Made in the lab
gaagaagatctaccccaccatctggtg

SEQ ID NO: 1641 - DNA, 28 bp, Artificial Sequence
  Made in the lab
agaagaagatctaccccaccatctggtg

SEQ ID NO: 1642 - DNA, 29 bp, Artificial Sequence
  Made in the lab
aagaagaagatctaccccaccatctggtg

SEQ ID NO: 1643 - DNA, 30 bp, Artificial Sequence
  Made in the lab
caagaagaagatctaccccaccatctggtg

SEQ ID NO: 1644 - DNA, 21 bp, Artificial Sequence
  Made in the lab
caccttcatcgtgggctatgc

SEQ ID NO: 1645 - DNA, 22 bp, Artificial Sequence
  Made in the lab
acaccttcatcgtgggctatgc

SEQ ID NO: 1646 - DNA, 23 bp, Artificial Sequence
  Made in the lab
aacaccttcatcgtgggctatgc

SEQ ID NO: 1647 - DNA, 24 bp, Artificial Sequence
  Made in the lab
aaacaccttcatcgtgggctatgc

SEQ ID NO: 1648 - DNA, 25 bp, Artificial Sequence
  Made in the lab
aaaacaccttcatcgtgggctatgc

SEQ ID NO: 1649 - DNA, 26 bp, Artificial Sequence
  Made in the lab
gaaaacaccttcatcgtgggctatgc

SEQ ID NO: 1650 - DNA, 27 bp, Artificial Sequence
  Made in the lab
cgaaaacaccttcatcgtgggctatgc

SEQ ID NO: 1651 - DNA, 28 bp, Artificial Sequence
  Made in the lab
ccgaaaacaccttcatcgtgggctatgc

SEQ ID NO: 1652 - DNA, 29 bp, Artificial Sequence
  Made in the lab
cccgaaaacaccttcatcgtgggctatgc

SEQ ID NO: 1653 - DNA, 30 bp, Artificial Sequence
  Made in the lab
gcccgaaaacaccttcatcgtgggctatgc

SEQ ID NO: 1654 - DNA, 21 bp, Artificial Sequence
  Made in the lab
tttgggatcatccgggacgtg

SEQ ID NO: 1655 - DNA, 22 bp, Artificial Sequence
  Made in the lab
atttgggatcatccgggacgtg

SEQ ID NO: 1656 - DNA, 23 bp, Artificial Sequence
  Made in the lab
aatttgggatcatccgggacgtg

SEQ ID NO: 1657 - DNA, 24 bp, Artificial Sequence
  Made in the lab
gaatttgggatcatccgggacgtg

SEQ ID NO: 1658 - DNA, 25 bp, Artificial Sequence
  Made in the lab
tgaatttgggatcatccgggacgtg

SEQ ID NO: 1659 - DNA, 26 bp, Artificial Sequence
  Made in the lab
atgaatttgggatcatccgggacgtg

SEQ ID NO: 1660 - DNA, 27 bp, Artificial Sequence
  Made in the lab
gatgaatttgggatcatccgggacgtg

SEQ ID NO: 1661 - DNA, 28 bp, Artificial Sequence
  Made in the lab
cgatgaatttgggatcatccgggacgtg

SEQ ID NO: 1662 - DNA, 29 bp, Artificial Sequence
  Made in the lab
tcgatgaatttgggatcatccgggacgtg

SEQ ID NO: 1663 - DNA, 30 bp, Artificial Sequence
  Made in the lab
ttcgatgaatttgggatcatccgggacgtg

SEQ ID NO: 1664 - DNA, 21 bp, Artificial Sequence
  Made in the lab
cgaggccgtgtacaccaagat

SEQ ID NO: 1665 - DNA, 22 bp, Artificial Sequence
  Made in the lab
acgaggccgtgtacaccaagat

SEQ ID NO: 1666 - DNA, 23 bp, Artificial Sequence
  Made in the lab
aacgaggccgtgtacaccaagat

SEQ ID NO: 1667 - DNA, 24 bp, Artificial Sequence
  Made in the lab
caacgaggccgtgtacaccaagat

SEQ ID NO: 1668 - DNA, 25 bp, Artificial Sequence
  Made in the lab
ccaacgaggccgtgtacaccaagat

SEQ ID NO: 1669 - DNA, 26 bp, Artificial Sequence
  Made in the lab
cccaacgaggccgtgtacaccaagat

SEQ ID NO: 1670 - DNA, 27 bp, Artificial Sequence
  Made in the lab
gcccaacgaggccgtgtacaccaagat

SEQ ID NO: 1671 - DNA, 28 bp, Artificial Sequence
  Made in the lab
agcccaacgaggccgtgtacaccaagat

SEQ ID NO: 1672 - DNA, 29 bp, Artificial Sequence
  Made in the lab
cagcccaacgaggccgtgtacaccaagat

SEQ ID NO: 1673 - DNA, 30 bp, Artificial Sequence
  Made in the lab
gcagcccaacgaggccgtgtacaccaagat

SEQ ID NO: 1674 - DNA, 21 bp, Artificial Sequence
  Made in the lab
gaaaagcagacgcagcagctg

SEQ ID NO: 1675 - DNA, 22 bp, Artificial Sequence
  Made in the lab
agaaaagcagacgcagcagctg

SEQ ID NO: 1676 - DNA, 23 bp, Artificial Sequence
  Made in the lab
aagaaaagcagacgcagcagctg

SEQ ID NO: 1677 - DNA, 24 bp, Artificial Sequence
  Made in the lab
taagaaaagcagacgcagcagctg

SEQ ID NO: 1678 - DNA, 25 bp, Artificial Sequence
  Made in the lab
ataagaaaagcagacgcagcagctg

SEQ ID NO: 1679 - DNA, 26 bp, Artificial Sequence
  Made in the lab
tataagaaaagcagacgcagcagctg

SEQ ID NO: 1680 - DNA, 27 bp, Artificial Sequence
  Made in the lab
ctataagaaaagcagacgcagcagctg

SEQ ID NO: 1681 - DNA, 28 bp, Artificial Sequence
  Made in the lab
gctataagaaaagcagacgcagcagctg

SEQ ID NO: 1682 - DNA, 29 bp, Artificial Sequence
  Made in the lab
tgctataagaaaagcagacgcagcagctg

SEQ ID NO: 1683 - DNA, 30 bp, Artificial Sequence
  Made in the lab
ctgctataagaaaagcagacgcagcagctg

SEQ ID NO: 1684 - DNA, 21 bp, Artificial Sequence
  Made in the lab
caggatcttcggccccatctg

SEQ ID NO: 1685 - DNA, 22 bp, Artificial Sequence
  Made in the lab
acaggatcttcggccccatctg

SEQ ID NO: 1686 - DNA, 23 bp, Artificial Sequence
  Made in the lab
aacaggatcttcggccccatctg

SEQ ID NO: 1687 - DNA, 24 bp, Artificial Sequence
  Made in the lab
caacaggatcttcggccccatctg

SEQ ID NO: 1688 - DNA, 25 bp, Artificial Sequence
  Made in the lab
ccaacaggatcttcggccccatctg

SEQ ID NO: 1689 - DNA, 26 bp, Artificial Sequence
  Made in the lab
gccaacaggatcttcggccccatctg

SEQ ID NO: 1690 - DNA, 27 bp, Artificial Sequence
  Made in the lab
tgccaacaggatcttcggccccatctg

SEQ ID NO: 1691 - DNA, 28 bp, Artificial Sequence
  Made in the lab
ttgccaacaggatcttcggccccatctg

SEQ ID NO: 1692 - DNA, 29 bp, Artificial Sequence
  Made in the lab
tttgccaacaggatcttcggccccatctg

SEQ ID NO: 1693 - DNA, 30 bp, Artificial Sequence
  Made in the lab
atttgccaacaggatcttcggccccatctg

SEQ ID NO: 1694 - DNA, 21 bp, Artificial Sequence
  Made in the lab
cgtgaagctccctgacgccta

SEQ ID NO: 1695 - DNA, 22 bp, Artificial Sequence
  Made in the lab
acgtgaagctccctgacgccta

SEQ ID NO: 1696 - DNA, 23 bp, Artificial Sequence
  Made in the lab
aacgtgaagctccctgacgccta

SEQ ID NO: 1697 - DNA, 24 bp, Artificial Sequence
  Made in the lab
gaacgtgaagctccctgacgccta

SEQ ID NO: 1698 - DNA, 25 bp, Artificial Sequence
  Made in the lab
agaacgtgaagctccctgacgccta

SEQ ID NO: 1699 - DNA, 26 bp, Artificial Sequence
  Made in the lab
aagaacgtgaagctccctgacgccta

SEQ ID NO: 1700 - DNA, 27 bp, Artificial Sequence
  Made in the lab
caagaacgtgaagctccctgacgccta

SEQ ID NO: 1701 - DNA, 28 bp, Artificial Sequence
  Made in the lab
acaagaacgtgaagctccctgacgccta

SEQ ID NO: 1702 - DNA, 29 bp, Artificial Sequence
  Made in the lab
tacaagaacgtgaagctccctgacgccta

SEQ ID NO: 1703 - DNA, 30 bp, Artificial Sequence
  Made in the lab
atacaagaacgtgaagctccctgacgccta

SEQ ID NO: 1704 - DNA, 21 bp, Artificial Sequence
  Made in the lab
gcccgcctccaccaactcaga

SEQ ID NO: 1705 - DNA, 22 bp, Artificial Sequence
  Made in the lab
agcccgcctccaccaactcaga

SEQ ID NO: 1706 - DNA, 23 bp, Artificial Sequence
  Made in the lab
aagcccgcctccaccaactcaga

SEQ ID NO: 1707 - DNA, 24 bp, Artificial Sequence
  Made in the lab
gaagcccgcctccaccaactcaga

SEQ ID NO: 1708 - DNA, 25 bp, Artificial Sequence
  Made in the lab
agaagcccgcctccaccaactcaga

SEQ ID NO: 1709 - DNA, 26 bp, Artificial Sequence
  Made in the lab
gagaagcccgcctccaccaactcaga

SEQ ID NO: 1710 - DNA, 27 bp, Artificial Sequence
  Made in the lab
ggagaagcccgcctccaccaactcaga

SEQ ID NO: 1711 - DNA, 28 bp, Artificial Sequence
  Made in the lab
tggagaagcccgcctccaccaactcaga

SEQ ID NO: 1712 - DNA, 29 bp, Artificial Sequence
  Made in the lab
atggagaagcccgcctccaccaactcaga

SEQ ID NO: 1713 - DNA, 30 bp, Artificial Sequence
  Made in the lab
catggagaagcccgcctccaccaactcaga

SEQ ID NO: 1714 - DNA, 21 bp, Artificial Sequence
  Made in the lab
tcagtcggatacacacatatt

SEQ ID NO: 1715 - DNA, 22 bp, Artificial Sequence
  Made in the lab
atcagtcggatacacacatatt

SEQ ID NO: 1716 - DNA, 23 bp, Artificial Sequence
  Made in the lab
catcagtcggatacacacatatt

SEQ ID NO: 1717 - DNA, 24 bp, Artificial Sequence
  Made in the lab
ccatcagtcggatacacacatatt

SEQ ID NO: 1718 - DNA, 25 bp, Artificial Sequence
  Made in the lab
tccatcagtcggatacacacatatt

SEQ ID NO: 1719 - DNA, 26 bp, Artificial Sequence
  Made in the lab
ttccatcagtcggatacacacatatt

SEQ ID NO: 1720 - DNA, 27 bp, Artificial Sequence
  Made in the lab
cttccatcagtcggatacacacatatt

SEQ ID NO: 1721 - DNA, 28 bp, Artificial Sequence
  Made in the lab
ccttccatcagtcggatacacacatatt

SEQ ID NO: 1722 - DNA, 29 bp, Artificial Sequence
  Made in the lab
gccttccatcagtcggatacacacatatt

SEQ ID NO: 1723 - DNA, 30 bp, Artificial Sequence
  Made in the lab
tgccttccatcagtcggatacacacatatt

SEQ ID NO: 1724 - DNA, 21 bp, Artificial Sequence
  Made in the lab
agagagtgggtttccagtatg

SEQ ID NO: 1725 - DNA, 22 bp, Artificial Sequence
  Made in the lab
aagagagtgggtttccagtatg

SEQ ID NO: 1726 - DNA, 23 bp, Artificial Sequence
  Made in the lab
gaagagagtgggtttccagtatg

SEQ ID NO: 1727 - DNA, 24 bp, Artificial Sequence
  Made in the lab
tgaagagagtgggtttccagtatg

SEQ ID NO: 1728 - DNA, 25 bp, Artificial Sequence
  Made in the lab
atgaagagagtgggtttccagtatg

SEQ ID NO: 1729 - DNA, 26 bp, Artificial Sequence
  Made in the lab
gatgaagagagtgggtttccagtatg

SEQ ID NO: 1730 - DNA, 27 bp, Artificial Sequence
  Made in the lab
tgatgaagagagtgggtttccagtatg

SEQ ID NO: 1731 - DNA, 28 bp, Artificial Sequence
  Made in the lab
ctgatgaagagagtgggtttccagtatg

SEQ ID NO: 1732 - DNA, 29 bp, Artificial Sequence
  Made in the lab
gctgatgaagagagtgggtttccagtatg

SEQ ID NO: 1733 - DNA, 30 bp, Artificial Sequence
  Made in the lab
agctgatgaagagagtgggtttccagtatg

SEQ ID NO: 1734 - DNA, 21 bp, Artificial Sequence
  Made in the lab
gatctaccgcatcgaccacta

SEQ ID NO: 1735 - DNA, 22 bp, Artificial Sequence
  Made in the lab
agatctaccgcatcgaccacta

SEQ ID NO: 1736 - DNA, 23 bp, Artificial Sequence
  Made in the lab
cagatctaccgcatcgaccacta

SEQ ID NO: 1737 - DNA, 24 bp, Artificial Sequence
  Made in the lab
ccagatctaccgcatcgaccacta

SEQ ID NO: 1738 - DNA, 25 bp, Artificial Sequence
  Made in the lab
accagatctaccgcatcgaccacta

SEQ ID NO: 1739 - DNA, 26 bp, Artificial Sequence
  Made in the lab
gaccagatctaccgcatcgaccacta

SEQ ID NO: 1740 - DNA, 27 bp, Artificial Sequence
  Made in the lab
ggaccagatctaccgcatcgaccacta

SEQ ID NO: 1741 - DNA, 28 bp, Artificial Sequence
  Made in the lab
aggaccagatctaccgcatcgaccacta

SEQ ID NO: 1742 - DNA, 29 bp, Artificial Sequence
  Made in the lab
gaggaccagatctaccgcatcgaccacta

SEQ ID NO: 1743 - DNA, 30 bp, Artificial Sequence
  Made in the lab
tgaggaccagatctaccgcatcgaccacta

SEQ ID NO: 1744 - DNA, 21 bp, Artificial Sequence
  Made in the lab
cctgacctacggcaacagata

SEQ ID NO: 1745 - DNA, 22 bp, Artificial Sequence
  Made in the lab
acctgacctacggcaacagata

SEQ ID NO: 1746 - DNA, 23 bp, Artificial Sequence
  Made in the lab
gacctgacctacggcaacagata

SEQ ID NO: 1747 - DNA, 24 bp, Artificial Sequence
  Made in the lab
ggacctgacctacggcaacagata

SEQ ID NO: 1748 - DNA, 25 bp, Artificial Sequence
  Made in the lab
tggacctgacctacggcaacagata

SEQ ID NO: 1749 - DNA, 26 bp, Artificial Sequence
  Made in the lab
ctggacctgacctacggcaacagata

SEQ ID NO: 1750 - DNA, 27 bp, Artificial Sequence
  Made in the lab
gctggacctgacctacggcaacagata

SEQ ID NO: 1751 - DNA, 28 bp, Artificial Sequence
  Made in the lab
agctggacctgacctacggcaacagata

SEQ ID NO: 1752 - DNA, 29 bp, Artificial Sequence
  Made in the lab
gagctggacctgacctacggcaacagata

SEQ ID NO: 1753 - DNA, 30 bp, Artificial Sequence
  Made in the lab
ggagctggacctgacctacggcaacagata

SEQ ID NO: 1754 - DNA, 21 bp, Artificial Sequence
  Made in the lab
ggcagcctctctgctataaga

SEQ ID NO: 1755 - DNA, 22 bp, Artificial Sequence
  Made in the lab
aggcagcctctctgctataaga

SEQ ID NO: 1756 - DNA, 23 bp, Artificial Sequence
  Made in the lab
taggcagcctctctgctataaga

SEQ ID NO: 1757 - DNA, 24 bp, Artificial Sequence
  Made in the lab
gtaggcagcctctctgctataaga

SEQ ID NO: 1758 - DNA, 25 bp, Artificial Sequence
  Made in the lab
cgtaggcagcctctctgctataaga

SEQ ID NO: 1759 - DNA, 26 bp, Artificial Sequence
  Made in the lab
ccgtaggcagcctctctgctataaga

SEQ ID NO: 1760 - DNA, 27 bp, Artificial Sequence
  Made in the lab
cccgtaggcagcctctctgctataaga

SEQ ID NO: 1761 - DNA, 28 bp, Artificial Sequence
  Made in the lab
acccgtaggcagcctctctgctataaga

SEQ ID NO: 1762 - DNA, 29 bp, Artificial Sequence
  Made in the lab
cacccgtaggcagcctctctgctataaga

SEQ ID NO: 1763 - DNA, 30 bp, Artificial Sequence
  Made in the lab
ccacccgtaggcagcctctctgctataaga

SEQ ID NO: 1764 - DNA, 25 bp, Artificial Sequence
  Made in the lab
ggaagcaatgtgccttagctgcctt

SEQ ID NO: 1765 - DNA, 25 bp, Artificial Sequence
  Made in the lab
gtgaagcagtacagctcctacaact

SEQ ID NO: 1766 - DNA, 25 bp, Artificial Sequence
  Made in the lab
gcagtacagctcctacaacttcttc

SEQ ID NO: 1767 - DNA, 25 bp, Artificial Sequence
  Made in the lab
tgaaagtccggaagcaatgtgcctt

SEQ ID NO: 1768 - DNA, 25 bp, Artificial Sequence
  Made in the lab
gcaatgtgccttagctgccttgaga

SEQ ID NO: 1769 - DNA, 25 bp, Artificial Sequence
  Made in the lab
tcgatgccaccaatactactagaga

SEQ ID NO: 1770 - DNA, 25 bp, Artificial Sequence
  Made in the lab
ccctacagttgtggcctccaatatc

SEQ ID NO: 1771 - DNA, 25 bp, Artificial Sequence
  Made in the lab
agttgtggcctccaatatcatggta

SEQ ID NO: 1772 - DNA, 25 bp, Artificial Sequence
  Made in the lab
gtggcctccaatatcatggtaagac

SEQ ID NO: 1773 - DNA, 25 bp, Artificial Sequence
  Made in the lab
agtccggaagcaatgtgccttagct

SEQ ID NO: 1774 - DNA, 25 bp, Artificial Sequence
  Made in the lab
gggaagtggtgtttcaaaccggcat

SEQ ID NO: 1775 - DNA, 25 bp, Artificial Sequence
  Made in the lab
ggcacagatcttagtgctcacctat

SEQ ID NO: 1776 - DNA, 25 bp, Artificial Sequence
  Made in the lab
ggaacagaaccttcatccctgccat

SEQ ID NO: 1777 - DNA, 25 bp, Artificial Sequence
  Made in the lab
gctttggactgtggcctcaagtata

SEQ ID NO: 1778 - DNA, 25 bp, Artificial Sequence
  Made in the lab
ggcctcaagtataatcagatccgat

SEQ ID NO: 1779 - DNA, 25 bp, Artificial Sequence
  Made in the lab
ggcattgtgcacaacagcttgcctt

SEQ ID NO: 1780 - DNA, 25 bp, Artificial Sequence
  Made in the lab
gccagacactgaatgacagggagta

SEQ ID NO: 1781 - DNA, 25 bp, Artificial Sequence
  Made in the lab
ggtggatgagaactgtgtgggcttt

SEQ ID NO: 1782 - DNA, 25 bp, Artificial Sequence
  Made in the lab
ggagactccaacagataagcggatt

SEQ ID NO: 1783 - DNA, 25 bp, Artificial Sequence
  Made in the lab
ggttcctgcaccgaatgaagcgtat

SEQ ID NO: 1784 - DNA, 25 bp, Artificial Sequence
  Made in the lab
ggagcggatcaaagccattgtgcat

SEQ ID NO: 1785 - DNA, 25 bp, Artificial Sequence
  Made in the lab
gccaaggatgaccagctgaaagtta

SEQ ID NO: 1786 - DNA, 25 bp, Artificial Sequence
  Made in the lab
ccaaggatgaccagctgaaagttat

SEQ ID NO: 1787 - DNA, 25 bp, Artificial Sequence
  Made in the lab
ggatgaccagctgaaagttattgaa

SEQ ID NO: 1788 - DNA, 25 bp, Artificial Sequence
  Made in the lab
ggaaggaggagatcctgctaattaa

SEQ ID NO: 1789 - DNA, 25 bp, Artificial Sequence
  Made in the lab
actggttctggagtcgtgggagtaa

SEQ ID NO: 1790 - DNA, 25 bp, Artificial Sequence
  Made in the lab
tcaccatggtgtgtgccatgcctaa

SEQ ID NO: 1791 - DNA, 25 bp, Artificial Sequence
  Made in the lab
acggaaggaggagatcctgctaatt

SEQ ID NO: 1792 - DNA, 25 bp, Artificial Sequence
  Made in the lab
tcaatgtggcacacacactgcgtat

SEQ ID NO: 1793 - DNA, 25 bp, Artificial Sequence
  Made in the lab
gactcgaatccagaaggaacgattt

SEQ ID NO: 1794 - DNA, 25 bp, Artificial Sequence
  Made in the lab
ccaagaacgagtcatgtttgacaaa

SEQ ID NO: 1795 - DNA, 25 bp, Artificial Sequence
  Made in the lab
cctgctcagatcaccatgaaagtaa

SEQ ID NO: 1796 - DNA, 25 bp, Artificial Sequence
  Made in the lab
ggtggccaagtcaacattggatatt

SEQ ID NO: 1797 - DNA, 25 bp, Artificial Sequence
  Made in the lab
ggatattgttctggccaataaagat

SEQ ID NO: 1798 - DNA, 25 bp, Artificial Sequence
  Made in the lab
ccttgtaccgatgctgagagtatat

SEQ ID NO: 1799 - DNA, 25 bp, Artificial Sequence
  Made in the lab
ggactggtctttgatgtgtccaaat

SEQ ID NO: 1800 - DNA, 25 bp, Artificial Sequence
  Made in the lab
ggcatgcctatcaaataaacgccat

SEQ ID NO: 1801 - DNA, 25 bp, Artificial Sequence
  Made in the lab
ggtgctttcattgatcaaagccaat

SEQ ID NO: 1802 - DNA, 25 bp, Artificial Sequence
  Made in the lab
gcaaactcactagtatgcacttcta

SEQ ID NO: 1803 - DNA, 25 bp, Artificial Sequence
  Made in the lab
gccatggtgtgctctttggagaata

SEQ ID NO: 1804 - DNA, 25 bp, Artificial Sequence
  Made in the lab
ggatgccaatggatcccgagacttt

SEQ ID NO: 1805 - DNA, 25 bp, Artificial Sequence
  Made in the lab
ggacagggagttgaccaactgcaaa

SEQ ID NO: 1806 - DNA, 25 bp, Artificial Sequence
  Made in the lab
ggtacaatccgcatccaactattaa

SEQ ID NO: 1807 - DNA, 25 bp, Artificial Sequence
  Made in the lab
gctcgaaggatattgtcagtcttta

SEQ ID NO: 1808 - DNA, 25 bp, Artificial Sequence
  Made in the lab
ggagctgagtaacaccatcgatcat

SEQ ID NO: 1809 - DNA, 25 bp, Artificial Sequence
  Made in the lab
gcaaatgtaactgtgccagttcttt

SEQ ID NO: 1810 - DNA, 25 bp, Artificial Sequence
  Made in the lab
actgtgccagttctttccataataa

SEQ ID NO: 1811 - DNA, 25 bp, Artificial Sequence
  Made in the lab
gcatttcaatcccacgtacttataa

SEQ ID NO: 1812 - DNA, 25 bp, Artificial Sequence
  Made in the lab
gcaaagagtgattgacaccatcaaa

SEQ ID NO: 1813 - DNA, 25 bp, Artificial Sequence
  Made in the lab
gctttcaaaggagctcgaaggatat

SEQ ID NO: 1814 - DNA, 25 bp, Artificial Sequence
  Made in the lab
ccattcctgagaagaatcgaccttt

SEQ ID NO: 1815 - DNA, 25 bp, Artificial Sequence
  Made in the lab
ggccatcttaaactatttgtgacaa

SEQ ID NO: 1816 - DNA, 25 bp, Artificial Sequence
  Made in the lab
ggagaaatataaacttctgccagaa

SEQ ID NO: 1817 - DNA, 25 bp, Artificial Sequence
  Made in the lab
ggaacagtgaatgccaaacacttaa

SEQ ID NO: 1818 - DNA, 25 bp, Artificial Sequence
  Made in the lab
tcacccaggccatcttaaactattt

SEQ ID NO: 1819 - DNA, 25 bp, Artificial Sequence
  Made in the lab
gcaagactttgaaagtgacacgttt

SEQ ID NO: 1820 - DNA, 25 bp, Artificial Sequence
  Made in the lab
gtagataaatgttgccaccttgttt

SEQ ID NO: 1821 - DNA, 25 bp, Artificial Sequence
  Made in the lab
ggaacccaaagcagattgcaagact

SEQ ID NO: 1822 - DNA, 25 bp, Artificial Sequence
  Made in the lab
gggaacagtgaatgccaaacactta

SEQ ID NO: 1823 - DNA, 25 bp, Artificial Sequence
  Made in the lab
gtgaatgccaaacacttaaagcaat

SEQ ID NO: 1824 - DNA, 25 bp, Artificial Sequence
  Made in the lab
ggtggccaaagtcaatacttccaaa

SEQ ID NO: 1825 - DNA, 25 bp, Artificial Sequence
  Made in the lab
ccaaaggcttcctgattgatggcta

SEQ ID NO: 1826 - DNA, 25 bp, Artificial Sequence
  Made in the lab
acggaggaagccgcttatcctgttt

SEQ ID NO: 1827 - DNA, 25 bp, Artificial Sequence
  Made in the lab
gccaaagtcaatacttccaaaggct

SEQ ID NO: 1828 - DNA, 25 bp, Artificial Sequence
  Made in the lab
gtggacgacaatgaggagaccatca

SEQ ID NO: 1829 - DNA, 25 bp, Artificial Sequence
  Made in the lab
gaacctgtcatcgccttctatgaga

SEQ ID NO: 1830 - DNA, 25 bp, Artificial Sequence
  Made in the lab
ccttctatgagaaacgtggcattgt

SEQ ID NO: 1831 - DNA, 25 bp, Artificial Sequence
  Made in the lab
tcatggacagctgagcactaaagga

SEQ ID NO: 1832 - DNA, 25 bp, Artificial Sequence
  Made in the lab
tggacagctgagcactaaaggaatt

SEQ ID NO: 1833 - DNA, 25 bp, Artificial Sequence
  Made in the lab
cagctgagcactaaaggaatttcta

SEQ ID NO: 1834 - DNA, 25 bp, Artificial Sequence
  Made in the lab
gcggctacggatgttgggatcatta

SEQ ID NO: 1835 - DNA, 25 bp, Artificial Sequence
  Made in the lab
gctacggatgttgggatcattatta

SEQ ID NO: 1836 - DNA, 25 bp, Artificial Sequence
  Made in the lab
acaccagggtggatctcgtgactat

SEQ ID NO: 1837 - DNA, 25 bp, Artificial Sequence
  Made in the lab
gtcaccagcaagaacggtgggattt

SEQ ID NO: 1838 - DNA, 25 bp, Artificial Sequence
  Made in the lab
gagcaagatacaggcttggaccaga

SEQ ID NO: 1839 - DNA, 25 bp, Artificial Sequence
  Made in the lab
gtaatgcaccgaaacgtccgctaca

SEQ ID NO: 1840 - DNA, 25 bp, Artificial Sequence
  Made in the lab
gtgacatgggacacctgcattggaa

SEQ ID NO: 1841 - DNA, 25 bp, Artificial Sequence
  Made in the lab
tcaccagcaagaacggtgggattta

SEQ ID NO: 1842 - DNA, 25 bp, Artificial Sequence
  Made in the lab
acggtgggatttacttgctggccaa

SEQ ID NO: 1843 - DNA, 25 bp, Artificial Sequence
  Made in the lab
agagtgaaggtggactttgccctct

SEQ ID NO: 1844 - DNA, 25 bp, Artificial Sequence
  Made in the lab
ggagtcgcttgtcaaggatctggtt

SEQ ID NO: 1845 - DNA, 25 bp, Artificial Sequence
  Made in the lab
ggacctacagagacatctgggattt

SEQ ID NO: 1846 - DNA, 25 bp, Artificial Sequence
  Made in the lab
ggaaggacaccgtcctagggtataa

SEQ ID NO: 1847 - DNA, 25 bp, Artificial Sequence
  Made in the lab
gtgagagtctaagagggctcagtaa

SEQ ID NO: 1848 - DNA, 25 bp, Artificial Sequence
  Made in the lab
gcctgaagtagaaagagacgggatt

SEQ ID NO: 1849 - DNA, 25 bp, Artificial Sequence
  Made in the lab
gctcagcaaacggaagacacttaaa

SEQ ID NO: 1850 - DNA, 25 bp, Artificial Sequence
  Made in the lab
gagtcgcttgtcaaggatctggtta

SEQ ID NO: 1851 - DNA, 25 bp, Artificial Sequence
  Made in the lab
tccagatcctgtatatccgcagcat

SEQ ID NO: 1852 - DNA, 25 bp, Artificial Sequence
  Made in the lab
acaggacactatcaagaggtataat

SEQ ID NO: 1853 - DNA, 25 bp, Artificial Sequence
  Made in the lab
gtcctagggtataacctggcaataa

SEQ ID NO: 1854 - DNA, 25 bp, Artificial Sequence
  Made in the lab
ccgccaccatcttgctttcctttaa

SEQ ID NO: 1855 - DNA, 25 bp, Artificial Sequence
  Made in the lab
ggagtcttctgagtgtttcctggaa

SEQ ID NO: 1856 - DNA, 25 bp, Artificial Sequence
  Made in the lab
tcgatacccaatacctctgcagaaa

SEQ ID NO: 1857 - DNA, 25 bp, Artificial Sequence
  Made in the lab
gggaaattgtgcgtctccctattct

SEQ ID NO: 1858 - DNA, 25 bp, Artificial Sequence
  Made in the lab
tccctattctgagtcttggaggaat

SEQ ID NO: 1859 - DNA, 25 bp, Artificial Sequence
  Made in the lab
ggaattggactggtccaaccttata

SEQ ID NO: 1860 - DNA, 25 bp, Artificial Sequence
  Made in the lab
gaccttgagtttaccaagttaccaa

SEQ ID NO: 1861 - DNA, 25 bp, Artificial Sequence
  Made in the lab
gtagatatgaggacttcagcaattt

SEQ ID NO: 1862 - DNA, 25 bp, Artificial Sequence
  Made in the lab
ggaaccacccatttgctgcgtctta

SEQ ID NO: 1863 - DNA, 25 bp, Artificial Sequence
  Made in the lab
gtcttacatccagtctgacgacaaa

SEQ ID NO: 1864 - DNA, 25 bp, Artificial Sequence
  Made in the lab
gctatccagtcagttcgctgctatt

SEQ ID NO: 1865 - DNA, 25 bp, Artificial Sequence
  Made in the lab
tggctatccagtcagttcgctgcta

SEQ ID NO: 1866 - DNA, 25 bp, Artificial Sequence
  Made in the lab
gagtttgatgctcgctgggtaacat

SEQ ID NO: 1867 - DNA, 25 bp, Artificial Sequence
  Made in the lab
gctcgctgggtaacatacttcaaca

SEQ ID NO: 1868 - DNA, 25 bp, Artificial Sequence
  Made in the lab
gcgtaaagggataaacacacttgtt

SEQ ID NO: 1869 - DNA, 25 bp, Artificial Sequence
  Made in the lab
atcattgatgctgctttgcgggcat

SEQ ID NO: 1870 - DNA, 25 bp, Artificial Sequence
  Made in the lab
gtacagttcgtatcctagaggttgt

SEQ ID NO: 1871 - DNA, 25 bp, Artificial Sequence
  Made in the lab
acagttcgtatcctagaggttgtta

SEQ ID NO: 1872 - DNA, 25 bp, Artificial Sequence
  Made in the lab
acagttacctggaaatactgatgat

SEQ ID NO: 1873 - DNA, 25 bp, Artificial Sequence
  Made in the lab
gttacctggaaatactgatgataac

SEQ ID NO: 1874 - DNA, 25 bp, Artificial Sequence
  Made in the lab
ggagttaatcaacaatgtcgccaaa

SEQ ID NO: 1875 - DNA, 25 bp, Artificial Sequence
  Made in the lab
ggacgtccagtttgatgagggacta

SEQ ID NO: 1876 - DNA, 25 bp, Artificial Sequence
  Made in the lab
ggaaattctggtgactggtatcaag

SEQ ID NO: 1877 - DNA, 25 bp, Artificial Sequence
  Made in the lab
gcccatggtggttactctgtgtttg

SEQ ID NO: 1878 - DNA, 25 bp, Artificial Sequence
  Made in the lab
ccaagaaggtcaagatgtactgcta

SEQ ID NO: 1879 - DNA, 25 bp, Artificial Sequence
  Made in the lab
ggctggttcagaggtgtctgcatta

SEQ ID NO: 1880 - DNA, 25 bp, Artificial Sequence
  Made in the lab
gcaggaaagaattaccactaccaag

SEQ ID NO: 1881 - DNA, 25 bp, Artificial Sequence
  Made in the lab
gctactacgtttgcccatttggatg

SEQ ID NO: 1882 - DNA, 25 bp, Artificial Sequence
  Made in the lab
gccatcctgggtatggatgaacttt

SEQ ID NO: 1883 - DNA, 25 bp, Artificial Sequence
  Made in the lab
gctgaggctccagagttcatggaaa

SEQ ID NO: 1884 - DNA, 59 bp, Artificial Sequence
  Made in the lab
ggaagcaatgtgccttagctgccttcgaaaaggcagctaaggcacattgcttccttttt

SEQ ID NO: 1885 - DNA, 59 bp, Artificial Sequence
  Made in the lab
gtgaagcagtacagctcctacaactcgaaagttgtaggagctgtactgcttcacttttt

SEQ ID NO: 1886 - DNA, 59 bp, Artificial Sequence
  Made in the lab
gcagtacagctcctacaacttcttccgaagaagaagttgtaggagctgtactgcttttt

SEQ ID NO: 1887 - DNA, 59 bp, Artificial Sequence
  Made in the lab
tgaaagtccggaagcaatgtgccttcgaaaaggcacattgcttccggactttcattttt

SEQ ID NO: 1888 - DNA, 59 bp, Artificial Sequence; identical to SEQ ID NO: 217
  Made in the lab

SEQ ID NO: 1889 - DNA, 59 bp, Artificial Sequence
  Made in the lab
tcgatgccaccaatactactagagacgaatctctagtagtattggtggcatcgattttt

SEQ ID NO: 1890 - DNA, 59 bp, Artificial Sequence
  Made in the lab
ccctacagttgtggcctccaatatccgaagatattggaggccacaactgtagggttttt

SEQ ID NO: 1891 - DNA, 59 bp, Artificial Sequence
  Made in the lab
agttgtggcctccaatatcatggtacgaataccatgatattggaggccacaactttttt

SEQ ID NO: 1892 - DNA, 59 bp, Artificial Sequence
  Made in the lab
gtggcctccaatatcatggtaagaccgaagtcttaccatgatattggaggccacttttt

SEQ ID NO: 1893 - DNA, 59 bp, Artificial Sequence
  Made in the lab
agtccggaagcaatgtgccttagctcgaaagctaaggcacattgcttccggactttttt

SEQ ID NO: 1894 - DNA, 59 bp, Artificial Sequence
  Made in the lab
gggaagtggtgtttcaaaccggcatcgaaatgccggtttgaaacaccacttcccttttt

SEQ ID NO: 1895 - DNA, 59 bp, Artificial Sequence
  Made in the lab
ggcacagatcttagtgctcacctatcgaaataggtgagcactaagatctgtgccttttt

SEQ ID NO: 1896 - DNA, 59 bp, Artificial Sequence
  Made in the lab
ggaacagaaccttcatccctgccatcgaaatggcagggatgaaggttctgttccttttt

SEQ ID NO: 1897 - DNA, 59 bp, Artificial Sequence
  Made in the lab
gctttggactgtggcctcaagtatacgaatatacttgaggccacagtccaaagcttttt

SEQ ID NO: 1898 - DNA, 59 bp, Artificial Sequence
  Made in the lab
ggcctcaagtataatcagatccgatcgaaatcggatctgattatacttgaggccttttt

SEQ ID NO: 1899 - DNA, 59 bp, Artificial Sequence
  Made in the lab
ggcattgtgcacaacagcttgccttcgaaaaggcaagctgttgtgcacaatgccttttt

SEQ ID NO: 1900 - DNA, 59 bp, Artificial Sequence
  Made in the lab
gccagacactgaatgacagggagtacgaatactccctgtcattcagtgtctggcttttt

SEQ ID NO: 1901 - DNA, 59 bp, Artificial Sequence
  Made in the lab
ggtggatgagaactgtgtgggctttcgaaaaagcccacacagttctcatccaccttttt

SEQ ID NO: 1902 - DNA, 59 bp, Artificial Sequence
  Made in the lab
ggagactccaacagataagcggattcgaaaatccgcttatctgttggagtctccttttt

SEQ ID NO: 1903 - DNA, 59 bp, Artificial Sequence
  Made in the lab
ggttcctgcaccgaatgaagcgtatcgaaatacgcttcattcggtgcaggaaccttttt

SEQ ID NO: 1904 - DNA, 59 bp, Artificial Sequence
  Made in the lab
ggagcggatcaaagccattgtgcatcgaaatgcacaatggctttgatccgctccttttt

SEQ ID NO: 1905 - DNA, 59 bp, Artificial Sequence
  Made in the lab
gccaaggatgaccagctgaaagttacgaataactttcagctggtcatccttggcttttt

SEQ ID NO: 1906 - DNA, 59 bp, Artificial Sequence
  Made in the lab
ccaaggatgaccagctgaaagttatcgaaataactttcagctggtcatccttggttttt

SEQ ID NO: 1907 - DNA, 59 bp, Artificial Sequence
  Made in the lab
ggatgaccagctgaaagttattgaacgaattcaataactttcagctggtcatccttttt

SEQ ID NO: 1908 - DNA, 59 bp, Artificial Sequence
  Made in the lab
ggaaggaggagatcctgctaattaacgaattaattagcaggatctcctccttccttttt

SEQ ID NO: 1909 - DNA, 59 bp, Artificial Sequence
  Made in the lab
actggttctggagtcgtgggagtaacgaattactcccacgactccagaaccagtttttt

SEQ ID NO: 1910 - DNA, 59 bp, Artificial Sequence
  Made in the lab
tcaccatggtgtgtgccatgcctaacgaattaggcatggcacacaccatggtgattttt

SEQ ID NO: 1911 - DNA, 59 bp, Artificial Sequence
  Made in the lab
acggaaggaggagatcctgctaattcgaaaattagcaggatctcctccttccgtttttt

SEQ ID NO: 1912 - DNA, 59 bp, Artificial Sequence
  Made in the lab
tcaatgtggcacacacactgcgtatcgaaatacgcagtgtgtgtgccacattgattttt

SEQ ID NO: 1913 - DNA, 59 bp, Artificial Sequence
  Made in the lab
gactcgaatccagaaggaacgatttcgaaaaatcgttccttctggattcgagtcttttt

SEQ ID NO: 1914 - DNA, 59 bp, Artificial Sequence
  Made in the lab
ccaagaacgagtcatgtttgacaaacgaatttgtcaaacatgactcgttcttggttttt

SEQ ID NO: 1915 - DNA, 59 bp, Artificial Sequence
  Made in the lab
cctgctcagatcaccatgaaagtaacgaattactttcatggtgatctgagcaggttttt

SEQ ID NO: 1916 - DNA, 59 bp, Artificial Sequence
  Made in the lab
ggtggccaagtcaacattggatattcgaaaatatccaatgttgacttggccaccttttt

SEQ ID NO: 1917 - DNA, 59 bp, Artificial Sequence
  Made in the lab
ggatattgttctggccaataaagatcgaaatctttattggccagaacaatatccttttt

SEQ ID NO: 1918 - DNA, 59 bp, Artificial Sequence
  Made in the lab
ccttgtaccgatgctgagagtatatcgaaatatactctcagcatcggtacaaggttttt

SEQ ID NO: 1919 - DNA, 59 bp, Artificial Sequence
  Made in the lab
ggactggtctttgatgtgtccaaatcgaaatttggacacatcaaagaccagtccttttt

SEQ ID NO: 1920 - DNA, 59 bp, Artificial Sequence
  Made in the lab
ggcatgcctatcaaataaacgccatcgaaatggcgtttatttgataggcatgccttttt

SEQ ID NO: 1921 - DNA, 59 bp, Artificial Sequence
  Made in the lab
ggtgctttcattgatcaaagccaatcgaaattggctttgatcaatgaaagcaccttttt

SEQ ID NO: 1922 - DNA, 59 bp, Artificial Sequence
  Made in the lab
gcaaactcactagtatgcacttctacgaatagaagtgcatactagtgagtttgcttttt

SEQ ID NO: 1923 - DNA, 59 bp, Artificial Sequence
  Made in the lab
gccatggtgtgctctttggagaatacgaatattctccaaagagcacaccatggcttttt

SEQ ID NO: 1924 - DNA, 59 bp, Artificial Sequence
  Made in the lab
ggatgccaatggatcccgagactttcgaaaaagtctcgggatccattggcatccttttt

SEQ ID NO: 1925 - DNA, 59 bp, Artificial Sequence
  Made in the lab
ggacagggagttgaccaactgcaaacgaatttgcagttggtcaactccctgtccttttt

SEQ ID NO: 1926 - DNA, 59 bp, Artificial Sequence
  Made in the lab
ggtacaatccgcatccaactattaacgaattaatagttggatgcggattgtaccttttt

SEQ ID NO: 1927 - DNA, 59 bp, Artificial Sequence
  Made in the lab
gctcgaaggatattgtcagtctttacgaataaagactgacaatatccttcgagcttttt

SEQ ID NO: 1928 - DNA, 59 bp, Artificial Sequence
  Made in the lab
ggagctgagtaacaccatcgatcatcgaaatgatcgatggtgttactcagctccttttt

SEQ ID NO: 1929 - DNA, 59 bp, Artificial Sequence
  Made in the lab
gcaaatgtaactgtgccagttctttcgaaaaagaactggcacagttacatttgcttttt

SEQ ID NO: 1930 - DNA, 59 bp, Artificial Sequence
  Made in the lab
actgtgccagttctttccataataacgaattattatggaaagaactggcacagtttttt

SEQ ID NO: 1931 - DNA, 59 bp, Artificial Sequence
  Made in the lab
gcatttcaatcccacgtacttataacgaattataagtacgtgggattgaaatgcttttt

SEQ ID NO: 1932 - DNA, 59 bp, Artificial Sequence
  Made in the lab
gcaaagagtgattgacaccatcaaacgaatttgatggtgtcaatcactctttgcttttt

SEQ ID NO: 1933 - DNA, 59 bp, Artificial Sequence
  Made in the lab
gctttcaaaggagctcgaaggatatcgaaatatccttcgagctcctttgaaagcttttt

SEQ ID NO: 1934 - DNA, 59 bp, Artificial Sequence
  Made in the lab
ccattcctgagaagaatcgacctttcgaaaaaggtcgattcttctcaggaatggttttt

SEQ ID NO: 1935 - DNA, 59 bp, Artificial Sequence
  Made in the lab
ggccatcttaaactatttgtgacaacgaattgtcacaaatagtttaagatggccttttt

SEQ ID NO: 1936 - DNA, 59 bp, Artificial Sequence
  Made in the lab
ggagaaatataaacttctgccagaacgaattctggcagaagtttatatttctccttttt

SEQ ID NO: 1937 - DNA, 59 bp, Artificial Sequence
  Made in the lab
ggaacagtgaatgccaaacacttaacgaattaagtgtttggcattcactgttccttttt

SEQ ID NO: 1938 - DNA, 59 bp, Artificial Sequence
  Made in the lab
tcacccaggccatcttaaactatttcgaaaaatagtttaagatggcctgggtgattttt

SEQ ID NO: 1939 - DNA, 59 bp, Artificial Sequence
  Made in the lab
gcaagactttgaaagtgacacgtttcgaaaaacgtgtcactttcaaagtcttgcttttt

SEQ ID NO: 1940 - DNA, 59 bp, Artificial Sequence
  Made in the lab
gtagataaatgttgccaccttgtttcgaaaaacaaggtggcaacatttatctacttttt

SEQ ID NO: 1941 - DNA, 59 bp, Artificial Sequence
  Made in the lab
ggaacccaaagcagattgcaagactcgaaagtcttgcaatctgctttgggttccttttt

SEQ ID NO: 1942 - DNA, 59 bp, Artificial Sequence
  Made in the lab
gggaacagtgaatgccaaacacttacgaataagtgtttggcattcactgttcccttttt

SEQ ID NO: 1943 - DNA, 59 bp, Artificial Sequence
  Made in the lab
gtgaatgccaaacacttaaagcaatcgaaattgctttaagtgtttggcattcacttttt

SEQ ID NO: 1944 - DNA, 59 bp, Artificial Sequence
  Made in the lab
ggtggccaaagtcaatacttccaaacgaatttggaagtattgactttggccaccttttt

SEQ ID NO: 1945 - DNA, 59 bp, Artificial Sequence
  Made in the lab
ccaaaggcttcctgattgatggctacgaatagccatcaatcaggaagcctttggttttt

SEQ ID NO: 1946 - DNA, 59 bp, Artificial Sequence
  Made in the lab
acggaggaagccgcttatcctgtttcgaaaaacaggataagcggcttcctccgtttttt

SEQ ID NO: 1947 - DNA, 59 bp, Artificial Sequence
  Made in the lab
gccaaagtcaatacttccaaaggctcgaaagcctttggaagtattgactttggcttttt

SEQ ID NO: 1948 - DNA, 59 bp, Artificial Sequence
  Made in the lab
gtggacgacaatgaggagaccatcacgaatgatggtctcctcattgtcgtccacttttt

SEQ ID NO: 1949 - DNA, 59 bp, Artificial Sequence
  Made in the lab
gaacctgtcatcgccttctatgagacgaatctcatagaaggcgatgacaggttcttttt

SEQ ID NO: 1950 - DNA, 59 bp, Artificial Sequence
  Made in the lab
ccttctatgagaaacgtggcattgtcgaaacaatgccacgtttctcatagaaggttttt

SEQ ID NO: 1951 - DNA, 59 bp, Artificial Sequence
  Made in the lab
tcatggacagctgagcactaaaggacgaatcctttagtgctcagctgtccatgattttt

SEQ ID NO: 1952 - DNA, 59 bp, Artificial Sequence
  Made in the lab
tggacagctgagcactaaaggaattcgaaaattcctttagtgctcagctgtccattttt

SEQ ID NO: 1953 - DNA, 59 bp, Artificial Sequence
  Made in the lab
cagctgagcactaaaggaatttctacgaatagaaattcctttagtgctcagctgttttt

SEQ ID NO: 1954 - DNA, 59 bp, Artificial Sequence
  Made in the lab
gcggctacggatgttgggatcattacgaataatgatcccaacatccgtagccgcttttt

SEQ ID NO: 1955 - DNA, 59 bp, Artificial Sequence
  Made in the lab
gctacggatgttgggatcattattacgaataataatgatcccaacatccgtagcttttt

SEQ ID NO: 1956 - DNA, 59 bp, Artificial Sequence
  Made in the lab
acaccagggtggatctcgtgactatcgaaatagtcacgagatccaccctggtgtttttt

SEQ ID NO: 1957 - DNA, 59 bp, Artificial Sequence
  Made in the lab
gtcaccagcaagaacggtgggatttcgaaaaatcccaccgttcttgctggtgacttttt

SEQ ID NO: 1958 - DNA, 59 bp, Artificial Sequence
  Made in the lab
gagcaagatacaggcttggaccagacgaatctggtccaagcctgtatcttgctcttttt

SEQ ID NO: 1959 - DNA, 59 bp, Artificial Sequence
  Made in the lab
gtaatgcaccgaaacgtccgctacacgaatgtagcggacgtttcggtgcattacttttt

SEQ ID NO: 1960 - DNA, 59 bp, Artificial Sequence
  Made in the lab
gtgacatgggacacctgcattggaacgaattccaatgcaggtgtcccatgtcacttttt

SEQ ID NO: 1961 - DNA, 59 bp, Artificial Sequence
  Made in the lab
tcaccagcaagaacggtgggatttacgaataaatcccaccgttcttgctggtgattttt

SEQ ID NO: 1962 - DNA, 59 bp, Artificial Sequence
  Made in the lab
acggtgggatttacttgctggccaacgaattggccagcaagtaaatcccaccgtttttt

SEQ ID NO: 1963 - DNA, 59 bp, Artificial Sequence
  Made in the lab
agagtgaaggtggactttgccctctcgaaagagggcaaagtccaccttcactctttttt

SEQ ID NO: 1964 - DNA, 59 bp, Artificial Sequence
  Made in the lab
ggagtcgcttgtcaaggatctggttcgaaaaccagatccttgacaagcgactccttttt

SEQ ID NO: 1965 - DNA, 59 bp, Artificial Sequence
  Made in the lab
ggacctacagagacatctgggatttcgaaaaatcccagatgtctctgtaggtccttttt

SEQ ID NO: 1966 - DNA, 59 bp, Artificial Sequence
  Made in the lab
ggaaggacaccgtcctagggtataacgaattataccctaggacggtgtccttccttttt

SEQ ID NO: 1967 - DNA, 59 bp, Artificial Sequence
  Made in the lab
gtgagagtctaagagggctcagtaacgaattactgagccctcttagactctcacttttt

SEQ ID NO: 1968 - DNA, 59 bp, Artificial Sequence
  Made in the lab
gcctgaagtagaaagagacgggattcgaaaatcccgtctctttctacttcaggcttttt

SEQ ID NO: 1969 - DNA, 59 bp, Artificial Sequence
  Made in the lab
gctcagcaaacggaagacacttaaacgaatttaagtgtcttccgtttgctgagcttttt

SEQ ID NO: 1970 - DNA, 59 bp, Artificial Sequence
  Made in the lab
gagtcgcttgtcaaggatctggttacgaataaccagatccttgacaagcgactcttttt

SEQ ID NO: 1971 - DNA, 59 bp, Artificial Sequence
  Made in the lab
tccagatcctgtatatccgcagcatcgaaatgctgcggatatacaggatctggattttt

SEQ ID NO: 1972 - DNA, 59 bp, Artificial Sequence
  Made in the lab
acaggacactatcaagaggtataatcgaaattatacctcttgatagtgtcctgtttttt

SEQ ID NO: 1973 - DNA, 59 bp, Artificial Sequence
  Made in the lab
gtcctagggtataacctggcaataacgaattattgccaggttataccctaggacttttt

SEQ ID NO: 1974 - DNA, 59 bp, Artificial Sequence
  Made in the lab
ccgccaccatcttgctttcctttaacgaattaaaggaaagcaagatggtggcggttttt

SEQ ID NO: 1975 - DNA, 59 bp, Artificial Sequence
  Made in the lab
ggagtcttctgagtgtttcctggaacgaattccaggaaacactcagaagactccttttt

SEQ ID NO: 1976 - DNA, 59 bp, Artificial Sequence
  Made in the lab
tcgatacccaatacctctgcagaaacgaatttctgcagaggtattgggtatcgattttt

SEQ ID NO: 1977 - DNA, 59 bp, Artificial Sequence
  Made in the lab
gggaaattgtgcgtctccctattctcgaaagaatagggagacgcacaatttcccttttt

SEQ ID NO: 1978 - DNA, 59 bp, Artificial Sequence
  Made in the lab
tccctattctgagtcttggaggaatcgaaattcctccaagactcagaatagggattttt

SEQ ID NO: 1979 - DNA, 59 bp, Artificial Sequence
  Made in the lab
ggaattggactggtccaaccttatacgaatataaggttggaccagtccaattccttttt

SEQ ID NO: 1980 - DNA, 59 bp, Artificial Sequence
  Made in the lab
gaccttgagtttaccaagttaccaacgaattggtaacttggtaaactcaaggtcttttt

SEQ ID NO: 1981 - DNA, 59 bp, Artificial Sequence
  Made in the lab
gtagatatgaggacttcagcaatttcgaaaaattgctgaagtcctcatatctacttttt

SEQ ID NO: 1982 - DNA, 59 bp, Artificial Sequence
  Made in the lab
ggaaccacccatttgctgcgtcttacgaataagacgcagcaaatgggtggttccttttt

SEQ ID NO: 1983 - DNA, 59 bp, Artificial Sequence
  Made in the lab
gtcttacatccagtctgacgacaaacgaatttgtcgtcagactggatgtaagacttttt

SEQ ID NO: 1984 - DNA, 59 bp, Artificial Sequence
  Made in the lab
gctatccagtcagttcgctgctattcgaaaatagcagcgaactgactggatagcttttt

SEQ ID NO: 1985 - DNA, 59 bp, Artificial Sequence
  Made in the lab
tggctatccagtcagttcgctgctacgaatagcagcgaactgactggatagccattttt

SEQ ID NO: 1986 - DNA, 59 bp, Artificial Sequence
  Made in the lab
gagtttgatgctcgctgggtaacatcgaaatgttacccagcgagcatcaaactcttttt

SEQ ID NO: 1987 - DNA, 59 bp, Artificial Sequence
  Made in the lab
gctcgctgggtaacatacttcaacacgaatgttgaagtatgttacccagcgagcttttt

SEQ ID NO: 1988 - DNA, 59 bp, Artificial Sequence
  Made in the lab
gcgtaaagggataaacacacttgttcgaaaacaagtgtgtttatccctttacgcttttt

SEQ ID NO: 1989 - DNA, 59 bp, Artificial Sequence
  Made in the lab
atcattgatgctgctttgcgggcatcgaaatgcccgcaaagcagcatcaatgatttttt

SEQ ID NO: 1990 - DNA, 59 bp, Artificial Sequence
  Made in the lab
gtacagttcgtatcctagaggttgtcgaaacaacctctaggatacgaactgtacttttt

SEQ ID NO: 1991 - DNA, 59 bp, Artificial Sequence
  Made in the lab
acagttcgtatcctagaggttgttacgaataacaacctctaggatacgaactgtttttt

SEQ ID NO: 1992 - DNA, 59 bp, Artificial Sequence
  Made in the lab
acagttacctggaaatactgatgatcgaaatcatcagtatttccaggtaactgtttttt

SEQ ID NO: 1993 - DNA, 59 bp, Artificial Sequence
  Made in the lab
gttacctggaaatactgatgataaccgaagttatcatcagtatttccaggtaacttttt

SEQ ID NO: 1994 - DNA, 59 bp, Artificial Sequence
  Made in the lab
ggagttaatcaacaatgtcgccaaacgaatttggcgacattgttgattaactccttttt

SEQ ID NO: 1995 - DNA, 59 bp, Artificial Sequence
  Made in the lab
ggacgtccagtttgatgagggactacgaatagtccctcatcaaactggacgtccttttt

SEQ ID NO: 1996 - DNA, 59 bp, Artificial Sequence
  Made in the lab
ggaaattctggtgactggtatcaagcgaacttgataccagtcaccagaatttccttttt

SEQ ID NO: 1997 - DNA, 59 bp, Artificial Sequence
  Made in the lab
gcccatggtggttactctgtgtttgcgaacaaacacagagtaaccaccatgggcttttt

SEQ ID NO: 1998 - DNA, 59 bp, Artificial Sequence
  Made in the lab
ccaagaaggtcaagatgtactgctacgaatagcagtacatcttgaccttcttggttttt

SEQ ID NO: 1999 - DNA, 59 bp, Artificial Sequence
  Made in the lab
ggctggttcagaggtgtctgcattacgaataatgcagacacctctgaaccagccttttt

SEQ ID NO: 2000 - DNA, 59 bp, Artificial Sequence
  Made in the lab
gcaggaaagaattaccactaccaagcgaacttggtagtggtaattctttcctgcttttt

SEQ ID NO: 2001 - DNA, 59 bp, Artificial Sequence
  Made in the lab
gctactacgtttgcccatttggatgcgaacatccaaatgggcaaacgtagtagcttttt

SEQ ID NO: 2002 - DNA, 59 bp, Artificial Sequence
  Made in the lab
gccatcctgggtatggatgaactttcgaaaaagttcatccatacccaggatggcttttt

SEQ ID NO: 2003 - DNA, 59 bp, Artificial Sequence
  Made in the lab
gctgaggctccagagttcatggaaacgaatttccatgaactctggagcctcagcttttt

SEQ ID NO: 2004 - DNA, 21 bp, Artificial Sequence
  Made in the lab
gcagtacagctcctacaactt

SEQ ID NO: 2005 - DNA, 22 bp, Artificial Sequence
  Made in the lab
agcagtacagctcctacaactt

SEQ ID NO: 2006 - DNA, 23 bp, Artificial Sequence
  Made in the lab
aagcagtacagctcctacaactt

SEQ ID NO: 2007 - DNA, 24 bp, Artificial Sequence
  Made in the lab
gaagcagtacagctcctacaactt

SEQ ID NO: 2008 - DNA, 25 bp, Artificial Sequence
  Made in the lab
tgaagcagtacagctcctacaactt

SEQ ID NO: 2009 - DNA, 26 bp, Artificial Sequence
  Made in the lab
gtgaagcagtacagctcctacaactt

SEQ ID NO: 2010 - DNA, 27 bp, Artificial Sequence
  Made in the lab
tgtgaagcagtacagctcctacaactt

SEQ ID NO: 2011 - DNA, 28 bp, Artificial Sequence
  Made in the lab
ctgtgaagcagtacagctcctacaactt

SEQ ID NO: 2012 - DNA, 29 bp, Artificial Sequence
  Made in the lab
gctgtgaagcagtacagctcctacaactt

SEQ ID NO: 2013 - DNA, 30 bp, Artificial Sequence
  Made in the lab
ggctgtgaagcagtacagctcctacaactt

SEQ ID NO: 2014 - DNA, 21 bp, Artificial Sequence
  Made in the lab
gacacatgatccttcattttg

SEQ ID NO: 2015 - DNA, 22 bp, Artificial Sequence
  Made in the lab
agacacatgatccttcattttg

SEQ ID NO: 2016 - DNA, 23 bp, Artificial Sequence
  Made in the lab
gagacacatgatccttcattttg

SEQ ID NO: 2017 - DNA, 24 bp, Artificial Sequence
  Made in the lab
ggagacacatgatccttcattttg

SEQ ID NO: 2018 - DNA, 25 bp, Artificial Sequence
  Made in the lab
aggagacacatgatccttcattttg

SEQ ID NO: 2019 - DNA, 26 bp, Artificial Sequence
  Made in the lab
gaggagacacatgatccttcattttg

SEQ ID NO: 2020 - DNA, 27 bp, Artificial Sequence
  Made in the lab
agaggagacacatgatccttcattttg

SEQ ID NO: 2021 - DNA, 28 bp, Artificial Sequence
  Made in the lab
gagaggagacacatgatccttcattttg

SEQ ID NO: 2022 - DNA, 29 bp, Artificial Sequence
  Made in the lab
agagaggagacacatgatccttcattttg

SEQ ID NO: 2023 - DNA, 30 bp, Artificial Sequence
  Made in the lab
gagagaggagacacatgatccttcattttg

SEQ ID NO: 2024 - DNA, 21 bp, Artificial Sequence
  Made in the lab
gttgtggcctccaatatcatg

SEQ ID NO: 2025 - DNA, 22 bp, Artificial Sequence
  Made in the lab
agttgtggcctccaatatcatg

SEQ ID NO: 2026 - DNA, 23 bp, Artificial Sequence
  Made in the lab
cagttgtggcctccaatatcatg

SEQ ID NO: 2027 - DNA, 24 bp, Artificial Sequence
  Made in the lab
acagttgtggcctccaatatcatg

SEQ ID NO: 2028 - DNA, 25 bp, Artificial Sequence
  Made in the lab
tacagttgtggcctccaatatcatg

SEQ ID NO: 2029 - DNA, 26 bp, Artificial Sequence
  Made in the lab
ctacagttgtggcctccaatatcatg

SEQ ID NO: 2030 - DNA, 27 bp, Artificial Sequence
  Made in the lab
cctacagttgtggcctccaatatcatg

SEQ ID NO: 2031 - DNA, 28 bp, Artificial Sequence
  Made in the lab
ccctacagttgtggcctccaatatcatg

SEQ ID NO: 2032 - DNA, 29 bp, Artificial Sequence
  Made in the lab
accctacagttgtggcctccaatatcatg

SEQ ID NO: 2033 - DNA, 30 bp, Artificial Sequence
  Made in the lab
gaccctacagttgtggcctccaatatcatg

SEQ ID NO: 2034 - DNA, 21 bp, Artificial Sequence
  Made in the lab
agtccggaagcaatgtgcctt

SEQ ID NO: 2035 - DNA, 22 bp, Artificial Sequence
  Made in the lab
aagtccggaagcaatgtgcctt

SEQ ID NO: 2036 - DNA, 23 bp, Artificial Sequence
  Made in the lab
aaagtccggaagcaatgtgcctt

SEQ ID NO: 2037 - DNA, 24 bp, Artificial Sequence
  Made in the lab
gaaagtccggaagcaatgtgcctt

SEQ ID NO: 2038 - DNA, 25 bp, Artificial Sequence
  Made in the lab
tgaaagtccggaagcaatgtgcctt

SEQ ID NO: 2039 - DNA, 26 bp, Artificial Sequence
  Made in the lab
atgaaagtccggaagcaatgtgcctt

SEQ ID NO: 2040 - DNA, 27 bp, Artificial Sequence
  Made in the lab
catgaaagtccggaagcaatgtgcctt

SEQ ID NO: 2041 - DNA, 28 bp, Artificial Sequence
  Made in the lab
ccatgaaagtccggaagcaatgtgcctt

SEQ ID NO: 2042 - DNA, 29 bp, Artificial Sequence
  Made in the lab
gccatgaaagtccggaagcaatgtgcctt

SEQ ID NO: 2043 - DNA, 30 bp, Artificial Sequence
  Made in the lab
agccatgaaagtccggaagcaatgtgcctt

SEQ ID NO: 2044 - DNA, 21 bp, Artificial Sequence
  Made in the lab
caatgaggaagccatgaaagt

SEQ ID NO: 2045 - DNA, 22 bp, Artificial Sequence
  Made in the lab
acaatgaggaagccatgaaagt

SEQ ID NO: 2046 - DNA, 23 bp, Artificial Sequence
  Made in the lab
gacaatgaggaagccatgaaagt

SEQ ID NO: 2047 - DNA, 24 bp, Artificial Sequence
  Made in the lab
cgacaatgaggaagccatgaaagt

SEQ ID NO: 2048 - DNA, 25 bp, Artificial Sequence
  Made in the lab
ccgacaatgaggaagccatgaaagt

SEQ ID NO: 2049 - DNA, 26 bp, Artificial Sequence
  Made in the lab
cccgacaatgaggaagccatgaaagt

SEQ ID NO: 2050 - DNA, 27 bp, Artificial Sequence
  Made in the lab
ccccgacaatgaggaagccatgaaagt

SEQ ID NO: 2051 - DNA, 28 bp, Artificial Sequence
  Made in the lab
gccccgacaatgaggaagccatgaaagt

SEQ ID NO: 2052 - DNA, 29 bp, Artificial Sequence
  Made in the lab
cgccccgacaatgaggaagccatgaaagt

SEQ ID NO: 2053 - DNA, 30 bp, Artificial Sequence; identical to SEQ ID NO: 1433
  Made in the lab

SEQ ID NO: 2054 - DNA, 21 bp, Artificial Sequence
  Made in the lab
cagttgtggcctccaatatca

SEQ ID NO: 2055 - DNA, 22 bp, Artificial Sequence
  Made in the lab
acagttgtggcctccaatatca

SEQ ID NO: 2056 - DNA, 23 bp, Artificial Sequence
  Made in the lab
tacagttgtggcctccaatatca

SEQ ID NO: 2057 - DNA, 24 bp, Artificial Sequence
  Made in the lab
ctacagttgtggcctccaatatca

SEQ ID NO: 2058 - DNA, 25 bp, Artificial Sequence
  Made in the lab
cctacagttgtggcctccaatatca

SEQ ID NO: 2059 - DNA, 26 bp, Artificial Sequence
  Made in the lab
ccctacagttgtggcctccaatatca

SEQ ID NO: 2060 - DNA, 27 bp, Artificial Sequence
  Made in the lab
accctacagttgtggcctccaatatca

SEQ ID NO: 2061 - DNA, 28 bp, Artificial Sequence
  Made in the lab
gaccctacagttgtggcctccaatatca

SEQ ID NO: 2062 - DNA, 29 bp, Artificial Sequence
  Made in the lab
cgaccctacagttgtggcctccaatatca

SEQ ID NO: 2063 - DNA, 30 bp, Artificial Sequence
  Made in the lab
acgaccctacagttgtggcctccaatatca

SEQ ID NO: 2064 - DNA, 21 bp, Artificial Sequence
  Made in the lab
tactactagagagaggagaca

SEQ ID NO: 2065 - DNA, 22 bp, Artificial Sequence
  Made in the lab
atactactagagagaggagaca

SEQ ID NO: 2066 - DNA, 23 bp, Artificial Sequence
  Made in the lab
aatactactagagagaggagaca

SEQ ID NO: 2067 - DNA, 24 bp, Artificial Sequence
  Made in the lab
caatactactagagagaggagaca

SEQ ID NO: 2068 - DNA, 25 bp, Artificial Sequence
  Made in the lab
ccaatactactagagagaggagaca

SEQ ID NO: 2069 - DNA, 26 bp, Artificial Sequence
  Made in the lab
accaatactactagagagaggagaca

SEQ ID NO: 2070 - DNA, 27 bp, Artificial Sequence
  Made in the lab
caccaatactactagagagaggagaca

SEQ ID NO: 2071 - DNA, 28 bp, Artificial Sequence
  Made in the lab
ccaccaatactactagagagaggagaca

SEQ ID NO: 2072 - DNA, 29 bp, Artificial Sequence
  Made in the lab
gccaccaatactactagagagaggagaca

SEQ ID NO: 2073 - DNA, 30 bp, Artificial Sequence
  Made in the lab
tgccaccaatactactagagagaggagaca

SEQ ID NO: 2074 - DNA, 21 bp, Artificial Sequence
  Made in the lab
gacctacatctccaagaagct

SEQ ID NO: 2075 - DNA, 22 bp, Artificial Sequence
  Made in the lab
agacctacatctccaagaagct

SEQ ID NO: 2076 - DNA, 23 bp, Artificial Sequence
  Made in the lab
aagacctacatctccaagaagct

SEQ ID NO: 2077 - DNA, 24 bp, Artificial Sequence
  Made in the lab
caagacctacatctccaagaagct

SEQ ID NO: 2078 - DNA, 25 bp, Artificial Sequence
  Made in the lab
gcaagacctacatctccaagaagct

SEQ ID NO: 2079 - DNA, 26 bp, Artificial Sequence
  Made in the lab
ggcaagacctacatctccaagaagct

SEQ ID NO: 2080 - DNA, 27 bp, Artificial Sequence
  Made in the lab
gggcaagacctacatctccaagaagct

SEQ ID NO: 2081 - DNA, 28 bp, Artificial Sequence
  Made in the lab
ggggcaagacctacatctccaagaagct

SEQ ID NO: 2082 - DNA, 29 bp, Artificial Sequence
  Made in the lab
cggggcaagacctacatctccaagaagct

SEQ ID NO: 2083 - DNA, 30 bp, Artificial Sequence
  Made in the lab
ccggggcaagacctacatctccaagaagct

SEQ ID NO: 2084 - DNA, 21 bp, Artificial Sequence
  Made in the lab
gccatgaaagtccggaagcaa

SEQ ID NO: 2085 - DNA, 22 bp, Artificial Sequence
  Made in the lab
agccatgaaagtccggaagcaa

SEQ ID NO: 2086 - DNA, 23 bp, Artificial Sequence
  Made in the lab
aagccatgaaagtccggaagcaa

SEQ ID NO: 2087 - DNA, 24 bp, Artificial Sequence
  Made in the lab
gaagccatgaaagtccggaagcaa

SEQ ID NO: 2088 - DNA, 25 bp, Artificial Sequence
  Made in the lab
ggaagccatgaaagtccggaagcaa

SEQ ID NO: 2089 - DNA, 26 bp, Artificial Sequence
  Made in the lab
aggaagccatgaaagtccggaagcaa

SEQ ID NO: 2090 - DNA, 27 bp, Artificial Sequence
  Made in the lab
gaggaagccatgaaagtccggaagcaa

SEQ ID NO: 2091 - DNA, 28 bp, Artificial Sequence
  Made in the lab
tgaggaagccatgaaagtccggaagcaa

SEQ ID NO: 2092 - DNA, 29 bp, Artificial Sequence
  Made in the lab
atgaggaagccatgaaagtccggaagcaa

SEQ ID NO: 2093 - DNA, 30 bp, Artificial Sequence
  Made in the lab
aatgaggaagccatgaaagtccggaagcaa

SEQ ID NO: 2094 - DNA, 21 bp, Artificial Sequence
  Made in the lab
tgtgccttagctgccttgaga

SEQ ID NO: 2095 - DNA, 22 bp, Artificial Sequence
  Made in the lab
atgtgccttagctgccttgaga

SEQ ID NO: 2096 - DNA, 23 bp, Artificial Sequence
  Made in the lab
aatgtgccttagctgccttgaga

SEQ ID NO: 2097 - DNA, 24 bp, Artificial Sequence
  Made in the lab
caatgtgccttagctgccttgaga

SEQ ID NO: 2098 - DNA, 25 bp, Artificial Sequence
  Made in the lab
gcaatgtgccttagctgccttgaga

SEQ ID NO: 2099 - DNA, 26 bp, Artificial Sequence
  Made in the lab
agcaatgtgccttagctgccttgaga

SEQ ID NO: 2100 - DNA, 27 bp, Artificial Sequence
  Made in the lab
aagcaatgtgccttagctgccttgaga

SEQ ID NO: 2101 - DNA, 28 bp, Artificial Sequence
  Made in the lab
gaagcaatgtgccttagctgccttgaga

SEQ ID NO: 2102 - DNA, 29 bp, Artificial Sequence
  Made in the lab
ggaagcaatgtgccttagctgccttgaga

SEQ ID NO: 2103 - DNA, 30 bp, Artificial Sequence
  Made in the lab
cggaagcaatgtgccttagctgccttgaga

SEQ ID NO: 2104 - DNA, 21 bp, Artificial Sequence
  Made in the lab
aagctacctggcgaaagaagg

SEQ ID NO: 2105 - DNA, 22 bp, Artificial Sequence
  Made in the lab
aaagctacctggcgaaagaagg

SEQ ID NO: 2106 - DNA, 23 bp, Artificial Sequence
  Made in the lab
aaaagctacctggcgaaagaagg

SEQ ID NO: 2107 - DNA, 24 bp, Artificial Sequence
  Made in the lab
caaaagctacctggcgaaagaagg

SEQ ID NO: 2108 - DNA, 25 bp, Artificial Sequence
  Made in the lab
tcaaaagctacctggcgaaagaagg

SEQ ID NO: 2109 - DNA, 26 bp, Artificial Sequence
  Made in the lab
gtcaaaagctacctggcgaaagaagg

SEQ ID NO: 2110 - DNA, 27 bp, Artificial Sequence
  Made in the lab
tgtcaaaagctacctggcgaaagaagg

SEQ ID NO: 2111 - DNA, 28 bp, Artificial Sequence
  Made in the lab
atgtcaaaagctacctggcgaaagaagg

SEQ ID NO: 2112 - DNA, 29 bp, Artificial Sequence
  Made in the lab
gatgtcaaaagctacctggcgaaagaagg

SEQ ID NO: 2113 - DNA, 30 bp, Artificial Sequence
  Made in the lab
agatgtcaaaagctacctggcgaaagaagg

SEQ ID NO: 2114 - DNA, 21 bp, Artificial Sequence
  Made in the lab
tatcatggtaagacagccggg

SEQ ID NO: 2115 - DNA, 22 bp, Artificial Sequence
  Made in the lab
atatcatggtaagacagccggg

SEQ ID NO: 2116 - DNA, 23 bp, Artificial Sequence
  Made in the lab
aatatcatggtaagacagccggg

SEQ ID NO: 2117 - DNA, 24 bp, Artificial Sequence
  Made in the lab
caatatcatggtaagacagccggg

SEQ ID NO: 2118 - DNA, 25 bp, Artificial Sequence
  Made in the lab
ccaatatcatggtaagacagccggg

SEQ ID NO: 2119 - DNA, 26 bp, Artificial Sequence
  Made in the lab
tccaatatcatggtaagacagccggg

SEQ ID NO: 2120 - DNA, 27 bp, Artificial Sequence
  Made in the lab
ctccaatatcatggtaagacagccggg

SEQ ID NO: 2121 - DNA, 28 bp, Artificial Sequence
  Made in the lab
cctccaatatcatggtaagacagccggg

SEQ ID NO: 2122 - DNA, 29 bp, Artificial Sequence
  Made in the lab
gcctccaatatcatggtaagacagccggg

SEQ ID NO: 2123 - DNA, 30 bp, Artificial Sequence
  Made in the lab
ggcctccaatatcatggtaagacagccggg

SEQ ID NO: 2124 - DNA, 21 bp, Artificial Sequence
  Made in the lab
gggcatttgcagtctgaggaa

SEQ ID NO: 2125 - DNA, 22 bp, Artificial Sequence
  Made in the lab
agggcatttgcagtctgaggaa

SEQ ID NO: 2126 - DNA, 23 bp, Artificial Sequence
  Made in the lab
aagggcatttgcagtctgaggaa

SEQ ID NO: 2127 - DNA, 24 bp, Artificial Sequence
  Made in the lab
caagggcatttgcagtctgaggaa

SEQ ID NO: 2128 - DNA, 25 bp, Artificial Sequence
  Made in the lab
acaagggcatttgcagtctgaggaa

SEQ ID NO: 2129 - DNA, 26 bp, Artificial Sequence
  Made in the lab
cacaagggcatttgcagtctgaggaa

SEQ ID NO: 2130 - DNA, 27 bp, Artificial Sequence
  Made in the lab
ccacaagggcatttgcagtctgaggaa

SEQ ID NO: 2131 - DNA, 28 bp, Artificial Sequence
  Made in the lab
accacaagggcatttgcagtctgaggaa

SEQ ID NO: 2132 - DNA, 29 bp, Artificial Sequence
  Made in the lab
gaccacaagggcatttgcagtctgaggaa

SEQ ID NO: 2133 - DNA, 30 bp, Artificial Sequence
  Made in the lab
agaccacaagggcatttgcagtctgaggaa

SEQ ID NO: 2134 - DNA, 21 bp, Artificial Sequence
  Made in the lab
ggagacacatgatccttcatt

SEQ ID NO: 2135 - DNA, 22 bp, Artificial Sequence
  Made in the lab
aggagacacatgatccttcatt

SEQ ID NO: 2136 - DNA, 23 bp, Artificial Sequence
  Made in the lab
gaggagacacatgatccttcatt

SEQ ID NO: 2137 - DNA, 24 bp, Artificial Sequence
  Made in the lab
agaggagacacatgatccttcatt

SEQ ID NO: 2138 - DNA, 25 bp, Artificial Sequence
  Made in the lab
gagaggagacacatgatccttcatt

SEQ ID NO: 2139 - DNA, 26 bp, Artificial Sequence
  Made in the lab
agagaggagacacatgatccttcatt

SEQ ID NO: 2140 - DNA, 27 bp, Artificial Sequence
  Made in the lab
gagagaggagacacatgatccttcatt

SEQ ID NO: 2141 - DNA, 28 bp, Artificial Sequence
  Made in the lab
agagagaggagacacatgatccttcatt

SEQ ID NO: 2142 - DNA, 29 bp, Artificial Sequence
  Made in the lab
tagagagaggagacacatgatccttcatt

SEQ ID NO: 2143 - DNA, 30 bp, Artificial Sequence; identical to SEQ ID NO: 1443
  Made in the lab

SEQ ID NO: 2144 - DNA, 21 bp, Artificial Sequence
  Made in the lab
gcgtagaccacaagggcattt

SEQ ID NO: 2145 - DNA, 22 bp, Artificial Sequence
  Made in the lab
agcgtagaccacaagggcattt

SEQ ID NO: 2146 - DNA, 23 bp, Artificial Sequence
  Made in the lab
cagcgtagaccacaagggcattt

SEQ ID NO: 2147 - DNA, 24 bp, Artificial Sequence
  Made in the lab
gcagcgtagaccacaagggcattt

SEQ ID NO: 2148 - DNA, 25 bp, Artificial Sequence
  Made in the lab
ggcagcgtagaccacaagggcattt

SEQ ID NO: 2149 - DNA, 26 bp, Artificial Sequence
  Made in the lab
cggcagcgtagaccacaagggcattt

SEQ ID NO: 2150 - DNA, 27 bp, Artificial Sequence
  Made in the lab
gcggcagcgtagaccacaagggcattt

SEQ ID NO: 2151 - DNA, 28 bp, Artificial Sequence
  Made in the lab
tgcggcagcgtagaccacaagggcattt

SEQ ID NO: 2152 - DNA, 29 bp, Artificial Sequence
  Made in the lab
ctgcggcagcgtagaccacaagggcattt

SEQ ID NO: 2153 - DNA, 30 bp, Artificial Sequence
  Made in the lab
tctgcggcagcgtagaccacaagggcattt

SEQ ID NO: 2154 - DNA, 21 bp, Artificial Sequence
  Made in the lab
agaaaatgactttaaggcgtt

SEQ ID NO: 2155 - DNA, 22 bp, Artificial Sequence
  Made in the lab
aagaaaatgactttaaggcgtt

SEQ ID NO: 2156 - DNA, 23 bp, Artificial Sequence
  Made in the lab
aaagaaaatgactttaaggcgtt

SEQ ID NO: 2157 - DNA, 24 bp, Artificial Sequence
  Made in the lab
caaagaaaatgactttaaggcgtt

SEQ ID NO: 2158 - DNA, 25 bp, Artificial Sequence
  Made in the lab
ccaaagaaaatgactttaaggcgtt

SEQ ID NO: 2159 - DNA, 26 bp, Artificial Sequence
  Made in the lab
gccaaagaaaatgactttaaggcgtt

SEQ ID NO: 2160 - DNA, 27 bp, Artificial Sequence
  Made in the lab
tgccaaagaaaatgactttaaggcgtt

SEQ ID NO: 2161 - DNA, 28 bp, Artificial Sequence
  Made in the lab
ttgccaaagaaaatgactttaaggcgtt

SEQ ID NO: 2162 - DNA, 29 bp, Artificial Sequence
  Made in the lab
tttgccaaagaaaatgactttaaggcgtt

SEQ ID NO: 2163 - DNA, 30 bp, Artificial Sequence
  Made in the lab
ttttgccaaagaaaatgactttaaggcgtt

SEQ ID NO: 2164 - DNA, 21 bp, Artificial Sequence
  Made in the lab
aatgactttaaggcgtttttc

SEQ ID NO: 2165 - DNA, 22 bp, Artificial Sequence
  Made in the lab
aaatgactttaaggcgtttttc

SEQ ID NO: 2166 - DNA, 23 bp, Artificial Sequence
  Made in the lab
aaaatgactttaaggcgtttttc

SEQ ID NO: 2167 - DNA, 24 bp, Artificial Sequence
  Made in the lab
gaaaatgactttaaggcgtttttc

SEQ ID NO: 2168 - DNA, 25 bp, Artificial Sequence
  Made in the lab
agaaaatgactttaaggcgtttttc

SEQ ID NO: 2169 - DNA, 26 bp, Artificial Sequence
  Made in the lab
aagaaaatgactttaaggcgtttttc

SEQ ID NO: 2170 - DNA, 27 bp, Artificial Sequence
  Made in the lab
aaagaaaatgactttaaggcgtttttc

SEQ ID NO: 2171 - DNA, 28 bp, Artificial Sequence
  Made in the lab
caaagaaaatgactttaaggcgtttttc

SEQ ID NO: 2172 - DNA, 29 bp, Artificial Sequence
  Made in the lab
ccaaagaaaatgactttaaggcgtttttc

SEQ ID NO: 2173 - DNA, 30 bp, Artificial Sequence
  Made in the lab
gccaaagaaaatgactttaaggcgtttttc

SEQ ID NO: 2174 - DNA, 21 bp, Artificial Sequence
  Made in the lab
gcaatgtgccttagctgcctt

SEQ ID NO: 2175 - DNA, 22 bp, Artificial Sequence
  Made in the lab
agcaatgtgccttagctgcctt

SEQ ID NO: 2176 - DNA, 23 bp, Artificial Sequence
  Made in the lab
aagcaatgtgccttagctgcctt

SEQ ID NO: 2177 - DNA, 24 bp, Artificial Sequence
  Made in the lab
gaagcaatgtgccttagctgcctt

SEQ ID NO: 2178 - DNA, 25 bp, Artificial Sequence
  Made in the lab
ggaagcaatgtgccttagctgcctt

SEQ ID NO: 2179 - DNA, 26 bp, Artificial Sequence
  Made in the lab
cggaagcaatgtgccttagctgcctt

SEQ ID NO: 2180 - DNA, 27 bp, Artificial Sequence
  Made in the lab
ccggaagcaatgtgccttagctgcctt

SEQ ID NO: 2181 - DNA, 28 bp, Artificial Sequence
  Made in the lab
tccggaagcaatgtgccttagctgcctt

SEQ ID NO: 2182 - DNA, 29 bp, Artificial Sequence
  Made in the lab
gtccggaagcaatgtgccttagctgcctt

SEQ ID NO: 2183 - DNA, 30 bp, Artificial Sequence
  Made in the lab
agtccggaagcaatgtgccttagctgcctt

SEQ ID NO: 2184 - DNA, 21 bp, Artificial Sequence
  Made in the lab
gctgactcgctacctcaactg

SEQ ID NO: 2185 - DNA, 22 bp, Artificial Sequence
  Made in the lab
agctgactcgctacctcaactg

SEQ ID NO: 2186 - DNA, 23 bp, Artificial Sequence
  Made in the lab
aagctgactcgctacctcaactg

SEQ ID NO: 2187 - DNA, 24 bp, Artificial Sequence
  Made in the lab
gaagctgactcgctacctcaactg

SEQ ID NO: 2188 - DNA, 25 bp, Artificial Sequence
  Made in the lab
agaagctgactcgctacctcaactg

SEQ ID NO: 2189 - DNA, 26 bp, Artificial Sequence
  Made in the lab
aagaagctgactcgctacctcaactg

SEQ ID NO: 2190 - DNA, 27 bp, Artificial Sequence
  Made in the lab
caagaagctgactcgctacctcaactg

SEQ ID NO: 2191 - DNA, 28 bp, Artificial Sequence
  Made in the lab
ccaagaagctgactcgctacctcaactg

SEQ ID NO: 2192 - DNA, 29 bp, Artificial Sequence
  Made in the lab
tccaagaagctgactcgctacctcaactg

SEQ ID NO: 2193 - DNA, 30 bp, Artificial Sequence
  Made in the lab
ctccaagaagctgactcgctacctcaactg

SEQ ID NO: 2194 - DNA, 21 bp, Artificial Sequence
  Made in the lab
cccaggtgatacgtaatgaac

SEQ ID NO: 2195 - DNA, 22 bp, Artificial Sequence
  Made in the lab
acccaggtgatacgtaatgaac

SEQ ID NO: 2196 - DNA, 23 bp, Artificial Sequence
  Made in the lab
aacccaggtgatacgtaatgaac

SEQ ID NO: 2197 - DNA, 24 bp, Artificial Sequence
  Made in the lab
taacccaggtgatacgtaatgaac

SEQ ID NO: 2198 - DNA, 25 bp, Artificial Sequence
  Made in the lab
gtaacccaggtgatacgtaatgaac

SEQ ID NO: 2199 - DNA, 26 bp, Artificial Sequence
  Made in the lab
tgtaacccaggtgatacgtaatgaac

SEQ ID NO: 2200 - DNA, 27 bp, Artificial Sequence
  Made in the lab
atgtaacccaggtgatacgtaatgaac

SEQ ID NO: 2201 - DNA, 28 bp, Artificial Sequence
  Made in the lab
tatgtaacccaggtgatacgtaatgaac

SEQ ID NO: 2202 - DNA, 29 bp, Artificial Sequence
  Made in the lab
ttatgtaacccaggtgatacgtaatgaac

SEQ ID NO: 2203 - DNA, 30 bp, Artificial Sequence
  Made in the lab
attatgtaacccaggtgatacgtaatgaac

SEQ ID NO: 2204 - DNA, 21 bp, Artificial Sequence
  Made in the lab
tggcagagatcggagagcatg

SEQ ID NO: 2205 - DNA, 22 bp, Artificial Sequence
  Made in the lab
atggcagagatcggagagcatg

SEQ ID NO: 2206 - DNA, 23 bp, Artificial Sequence
  Made in the lab
aatggcagagatcggagagcatg

SEQ ID NO: 2207 - DNA, 24 bp, Artificial Sequence
  Made in the lab
gaatggcagagatcggagagcatg

SEQ ID NO: 2208 - DNA, 25 bp, Artificial Sequence
  Made in the lab
agaatggcagagatcggagagcatg

SEQ ID NO: 2209 - DNA, 26 bp, Artificial Sequence
  Made in the lab
cagaatggcagagatcggagagcatg

SEQ ID NO: 2210 - DNA, 27 bp, Artificial Sequence
  Made in the lab
ccagaatggcagagatcggagagcatg

SEQ ID NO: 2211 - DNA, 28 bp, Artificial Sequence
  Made in the lab
gccagaatggcagagatcggagagcatg

SEQ ID NO: 2212 - DNA, 29 bp, Artificial Sequence
  Made in the lab
tgccagaatggcagagatcggagagcatg

SEQ ID NO: 2213 - DNA, 30 bp, Artificial Sequence
  Made in the lab
ctgccagaatggcagagatcggagagcatg

SEQ ID NO: 2214 - DNA, 21 bp, Artificial Sequence
  Made in the lab
gctggtccagaatggaacaga

SEQ ID NO: 2215 - DNA, 22 bp, Artificial Sequence
  Made in the lab
agctggtccagaatggaacaga

SEQ ID NO: 2216 - DNA, 23 bp, Artificial Sequence
  Made in the lab
aagctggtccagaatggaacaga

SEQ ID NO: 2217 - DNA, 24 bp, Artificial Sequence
  Made in the lab
gaagctggtccagaatggaacaga

SEQ ID NO: 2218 - DNA, 25 bp, Artificial Sequence
  Made in the lab
ggaagctggtccagaatggaacaga

SEQ ID NO: 2219 - DNA, 26 bp, Artificial Sequence
  Made in the lab
gggaagctggtccagaatggaacaga

SEQ ID NO: 2220 - DNA, 27 bp, Artificial Sequence
  Made in the lab
ggggaagctggtccagaatggaacaga

SEQ ID NO: 2221 - DNA, 28 bp, Artificial Sequence
  Made in the lab
tggggaagctggtccagaatggaacaga

SEQ ID NO: 2222 - DNA, 29 bp, Artificial Sequence
  Made in the lab
ctggggaagctggtccagaatggaacaga

SEQ ID NO: 2223 - DNA, 30 bp, Artificial Sequence
  Made in the lab
gctggggaagctggtccagaatggaacaga

SEQ ID NO: 2224 - DNA, 21 bp, Artificial Sequence
  Made in the lab
gagtatgagggtctcttctta

SEQ ID NO: 2225 - DNA, 22 bp, Artificial Sequence
  Made in the lab
agagtatgagggtctcttctta

SEQ ID NO: 2226 - DNA, 23 bp, Artificial Sequence
  Made in the lab
aagagtatgagggtctcttctta

SEQ ID NO: 2227 - DNA, 24 bp, Artificial Sequence
  Made in the lab
caagagtatgagggtctcttctta

SEQ ID NO: 2228 - DNA, 25 bp, Artificial Sequence
  Made in the lab
ccaagagtatgagggtctcttctta

SEQ ID NO: 2229 - DNA, 26 bp, Artificial Sequence
  Made in the lab
gccaagagtatgagggtctcttctta

SEQ ID NO: 2230 - DNA, 27 bp, Artificial Sequence
  Made in the lab
agccaagagtatgagggtctcttctta

SEQ ID NO: 2231 - DNA, 28 bp, Artificial Sequence
  Made in the lab
cagccaagagtatgagggtctcttctta

SEQ ID NO: 2232 - DNA, 29 bp, Artificial Sequence
  Made in the lab
acagccaagagtatgagggtctcttctta

SEQ ID NO: 2233 - DNA, 30 bp, Artificial Sequence
  Made in the lab
gacagccaagagtatgagggtctcttctta

SEQ ID NO: 2234 - DNA, 21 bp, Artificial Sequence
  Made in the lab
gactccacgggtattcaatac

SEQ ID NO: 2235 - DNA, 22 bp, Artificial Sequence
  Made in the lab
agactccacgggtattcaatac

SEQ ID NO: 2236 - DNA, 23 bp, Artificial Sequence
  Made in the lab
aagactccacgggtattcaatac

SEQ ID NO: 2237 - DNA, 24 bp, Artificial Sequence
  Made in the lab
taagactccacgggtattcaatac

SEQ ID NO: 2238 - DNA, 25 bp, Artificial Sequence
  Made in the lab
ttaagactccacgggtattcaatac

SEQ ID NO: 2239 - DNA, 26 bp, Artificial Sequence
  Made in the lab
attaagactccacgggtattcaatac

SEQ ID NO: 2240 - DNA, 27 bp, Artificial Sequence
  Made in the lab
cattaagactccacgggtattcaatac

SEQ ID NO: 2241 - DNA, 28 bp, Artificial Sequence
  Made in the lab
ccattaagactccacgggtattcaatac

SEQ ID NO: 2242 - DNA, 29 bp, Artificial Sequence
  Made in the lab
tccattaagactccacgggtattcaatac

SEQ ID NO: 2243 - DNA, 30 bp, Artificial Sequence
  Made in the lab
ctccattaagactccacgggtattcaatac

SEQ ID NO: 2244 - DNA, 21 bp, Artificial Sequence
  Made in the lab
cgccaatgatggttccaatga

SEQ ID NO: 2245 - DNA, 22 bp, Artificial Sequence
  Made in the lab
acgccaatgatggttccaatga

SEQ ID NO: 2246 - DNA, 23 bp, Artificial Sequence
  Made in the lab
aacgccaatgatggttccaatga

SEQ ID NO: 2247 - DNA, 24 bp, Artificial Sequence
  Made in the lab
caacgccaatgatggttccaatga

SEQ ID NO: 2248 - DNA, 25 bp, Artificial Sequence
  Made in the lab
ccaacgccaatgatggttccaatga

SEQ ID NO: 2249 - DNA, 26 bp, Artificial Sequence
  Made in the lab
accaacgccaatgatggttccaatga

SEQ ID NO: 2250 - DNA, 27 bp, Artificial Sequence
  Made in the lab
caccaacgccaatgatggttccaatga

SEQ ID NO: 2251 - DNA, 28 bp, Artificial Sequence
  Made in the lab
tcaccaacgccaatgatggttccaatga

SEQ ID NO: 2252 - DNA, 29 bp, Artificial Sequence
  Made in the lab
ttcaccaacgccaatgatggttccaatga

SEQ ID NO: 2253 - DNA, 30 bp, Artificial Sequence
  Made in the lab
cttcaccaacgccaatgatggttccaatga

SEQ ID NO: 2254 - DNA, 21 bp, Artificial Sequence
  Made in the lab
ccctgagtctgagcagtatta

SEQ ID NO: 2255 - DNA, 22 bp, Artificial Sequence
  Made in the lab
accctgagtctgagcagtatta

SEQ ID NO: 2256 - DNA, 23 bp, Artificial Sequence
  Made in the lab
aaccctgagtctgagcagtatta

SEQ ID NO: 2257 - DNA, 24 bp, Artificial Sequence
  Made in the lab
gaaccctgagtctgagcagtatta

SEQ ID NO: 2258 - DNA, 25 bp, Artificial Sequence
  Made in the lab
tgaaccctgagtctgagcagtatta

SEQ ID NO: 2259 - DNA, 26 bp, Artificial Sequence
  Made in the lab
ttgaaccctgagtctgagcagtatta

SEQ ID NO: 2260 - DNA, 27 bp, Artificial Sequence
  Made in the lab
cttgaaccctgagtctgagcagtatta

SEQ ID NO: 2261 - DNA, 28 bp, Artificial Sequence
  Made in the lab
ccttgaaccctgagtctgagcagtatta

SEQ ID NO: 2262 - DNA, 29 bp, Artificial Sequence
  Made in the lab
gccttgaaccctgagtctgagcagtatta

SEQ ID NO: 2263 - DNA, 30 bp, Artificial Sequence
  Made in the lab
tgccttgaaccctgagtctgagcagtatta

SEQ ID NO: 2264 - DNA, 21 bp, Artificial Sequence
  Made in the lab
accagtcagcgatatggagtt

SEQ ID NO: 2265 - DNA, 22 bp, Artificial Sequence
  Made in the lab
aaccagtcagcgatatggagtt

SEQ ID NO: 2266 - DNA, 23 bp, Artificial Sequence
  Made in the lab
aaaccagtcagcgatatggagtt

SEQ ID NO: 2267 - DNA, 24 bp, Artificial Sequence
  Made in the lab
gaaaccagtcagcgatatggagtt

SEQ ID NO: 2268 - DNA, 25 bp, Artificial Sequence
  Made in the lab
tgaaaccagtcagcgatatggagtt

SEQ ID NO: 2269 - DNA, 26 bp, Artificial Sequence
  Made in the lab
gtgaaaccagtcagcgatatggagtt

SEQ ID NO: 2270 - DNA, 27 bp, Artificial Sequence
  Made in the lab
agtgaaaccagtcagcgatatggagtt

SEQ ID NO: 2271 - DNA, 28 bp, Artificial Sequence
  Made in the lab
cagtgaaaccagtcagcgatatggagtt

SEQ ID NO: 2272 - DNA, 29 bp, Artificial Sequence
  Made in the lab
acagtgaaaccagtcagcgatatggagtt

SEQ ID NO: 2273 - DNA, 30 bp, Artificial Sequence
  Made in the lab
cacagtgaaaccagtcagcgatatggagtt

SEQ ID NO: 2274 - DNA, 21 bp, Artificial Sequence
  Made in the lab
ccttcatccctgccattcttg

SEQ ID NO: 2275 - DNA, 22 bp, Artificial Sequence
  Made in the lab
accttcatccctgccattcttg

SEQ ID NO: 2276 - DNA, 23 bp, Artificial Sequence
  Made in the lab
aaccttcatccctgccattcttg

SEQ ID NO: 2277 - DNA, 24 bp, Artificial Sequence
  Made in the lab
gaaccttcatccctgccattcttg

SEQ ID NO: 2278 - DNA, 25 bp, Artificial Sequence
  Made in the lab
agaaccttcatccctgccattcttg

SEQ ID NO: 2279 - DNA, 26 bp, Artificial Sequence
  Made in the lab
cagaaccttcatccctgccattcttg

SEQ ID NO: 2280 - DNA, 27 bp, Artificial Sequence
  Made in the lab
acagaaccttcatccctgccattcttg

SEQ ID NO: 2281 - DNA, 28 bp, Artificial Sequence
  Made in the lab
aacagaaccttcatccctgccattcttg

SEQ ID NO: 2282 - DNA, 29 bp, Artificial Sequence
  Made in the lab
gaacagaaccttcatccctgccattcttg

SEQ ID NO: 2283 - DNA, 30 bp, Artificial Sequence
  Made in the lab
ggaacagaaccttcatccctgccattcttg

SEQ ID NO: 2284 - DNA, 21 bp, Artificial Sequence
  Made in the lab
ggcattgtgcacaacagcttg

SEQ ID NO: 2285 - DNA, 22 bp, Artificial Sequence
  Made in the lab
aggcattgtgcacaacagcttg

SEQ ID NO: 2286 - DNA, 23 bp, Artificial Sequence
  Made in the lab
aaggcattgtgcacaacagcttg

SEQ ID NO: 2287 - DNA, 24 bp, Artificial Sequence
  Made in the lab
gaaggcattgtgcacaacagcttg

SEQ ID NO: 2288 - DNA, 25 bp, Artificial Sequence
  Made in the lab
tgaaggcattgtgcacaacagcttg

SEQ ID NO: 2289 - DNA, 26 bp, Artificial Sequence
  Made in the lab
atgaaggcattgtgcacaacagcttg

SEQ ID NO: 2290 - DNA, 27 bp, Artificial Sequence
  Made in the lab
aatgaaggcattgtgcacaacagcttg

SEQ ID NO: 2291 - DNA, 28 bp, Artificial Sequence
  Made in the lab
caatgaaggcattgtgcacaacagcttg

SEQ ID NO: 2292 - DNA, 29 bp, Artificial Sequence
  Made in the lab
ccaatgaaggcattgtgcacaacagcttg

SEQ ID NO: 2293 - DNA, 30 bp, Artificial Sequence
  Made in the lab
tccaatgaaggcattgtgcacaacagcttg

SEQ ID NO: 2294 - DNA, 21 bp, Artificial Sequence
  Made in the lab
gctagcattgggcatcccttt

SEQ ID NO: 2295 - DNA, 22 bp, Artificial Sequence
  Made in the lab
agctagcattgggcatcccttt

SEQ ID NO: 2296 - DNA, 23 bp, Artificial Sequence
  Made in the lab
aagctagcattgggcatcccttt

SEQ ID NO: 2297 - DNA, 24 bp, Artificial Sequence
  Made in the lab
caagctagcattgggcatcccttt

SEQ ID NO: 2298 - DNA, 25 bp, Artificial Sequence
  Made in the lab
ccaagctagcattgggcatcccttt

SEQ ID NO: 2299 - DNA, 26 bp, Artificial Sequence
  Made in the lab
gccaagctagcattgggcatcccttt

SEQ ID NO: 2300 - DNA, 27 bp, Artificial Sequence
  Made in the lab
agccaagctagcattgggcatcccttt

SEQ ID NO: 2301 - DNA, 28 bp, Artificial Sequence
  Made in the lab
cagccaagctagcattgggcatcccttt

SEQ ID NO: 2302 - DNA, 29 bp, Artificial Sequence
  Made in the lab
gcagccaagctagcattgggcatcccttt

SEQ ID NO: 2303 - DNA, 30 bp, Artificial Sequence
  Made in the lab
ggcagccaagctagcattgggcatcccttt

SEQ ID NO: 2304 - DNA, 21 bp, Artificial Sequence
  Made in the lab
ccagtcagcgatatggagttg

SEQ ID NO: 2305 - DNA, 22 bp, Artificial Sequence
  Made in the lab
accagtcagcgatatggagttg

SEQ ID NO: 2306 - DNA, 23 bp, Artificial Sequence
  Made in the lab
aaccagtcagcgatatggagttg

SEQ ID NO: 2307 - DNA, 24 bp, Artificial Sequence
  Made in the lab
aaaccagtcagcgatatggagttg

SEQ ID NO: 2308 - DNA, 25 bp, Artificial Sequence
  Made in the lab
gaaaccagtcagcgatatggagttg

SEQ ID NO: 2309 - DNA, 26 bp, Artificial Sequence
  Made in the lab
tgaaaccagtcagcgatatggagttg

SEQ ID NO: 2310 - DNA, 27 bp, Artificial Sequence
  Made in the lab
gtgaaaccagtcagcgatatggagttg

SEQ ID NO: 2311 - DNA, 28 bp, Artificial Sequence
  Made in the lab
agtgaaaccagtcagcgatatggagttg

SEQ ID NO: 2312 - DNA, 29 bp, Artificial Sequence
  Made in the lab
cagtgaaaccagtcagcgatatggagttg

SEQ ID NO: 2313 - DNA, 30 bp, Artificial Sequence
  Made in the lab
acagtgaaaccagtcagcgatatggagttg

SEQ ID NO: 2314 - DNA, 21 bp, Artificial Sequence
  Made in the lab
caggccaagtgtcttggcttc

SEQ ID NO: 2315 - DNA, 22 bp, Artificial Sequence
  Made in the lab
acaggccaagtgtcttggcttc

SEQ ID NO: 2316 - DNA, 23 bp, Artificial Sequence
  Made in the lab
aacaggccaagtgtcttggcttc

SEQ ID NO: 2317 - DNA, 24 bp, Artificial Sequence
  Made in the lab
caacaggccaagtgtcttggcttc

SEQ ID NO: 2318 - DNA, 25 bp, Artificial Sequence
  Made in the lab
gcaacaggccaagtgtcttggcttc

SEQ ID NO: 2319 - DNA, 26 bp, Artificial Sequence
  Made in the lab
tgcaacaggccaagtgtcttggcttc

SEQ ID NO: 2320 - DNA, 27 bp, Artificial Sequence
  Made in the lab
ctgcaacaggccaagtgtcttggcttc

SEQ ID NO: 2321 - DNA, 28 bp, Artificial Sequence
  Made in the lab
gctgcaacaggccaagtgtcttggcttc

SEQ ID NO: 2322 - DNA, 29 bp, Artificial Sequence
  Made in the lab
tgctgcaacaggccaagtgtcttggcttc

SEQ ID NO: 2323 - DNA, 30 bp, Artificial Sequence
  Made in the lab
ctgctgcaacaggccaagtgtcttggcttc

SEQ ID NO: 2324 - DNA, 21 bp, Artificial Sequence
  Made in the lab
gccaagtgctagtagacaagt

SEQ ID NO: 2325 - DNA, 22 bp, Artificial Sequence
  Made in the lab
agccaagtgctagtagacaagt

SEQ ID NO: 2326 - DNA, 23 bp, Artificial Sequence
  Made in the lab
cagccaagtgctagtagacaagt

SEQ ID NO: 2327 - DNA, 24 bp, Artificial Sequence
  Made in the lab
ccagccaagtgctagtagacaagt

SEQ ID NO: 2328 - DNA, 25 bp, Artificial Sequence
  Made in the lab
accagccaagtgctagtagacaagt

SEQ ID NO: 2329 - DNA, 26 bp, Artificial Sequence
  Made in the lab
taccagccaagtgctagtagacaagt

SEQ ID NO: 2330 - DNA, 27 bp, Artificial Sequence
  Made in the lab
ataccagccaagtgctagtagacaagt

SEQ ID NO: 2331 - DNA, 28 bp, Artificial Sequence
  Made in the lab
cataccagccaagtgctagtagacaagt

SEQ ID NO: 2332 - DNA, 29 bp, Artificial Sequence
  Made in the lab
ccataccagccaagtgctagtagacaagt

SEQ ID NO: 2333 - DNA, 30 bp, Artificial Sequence
  Made in the lab
cccataccagccaagtgctagtagacaagt

SEQ ID NO: 2334 - DNA, 21 bp, Artificial Sequence
  Made in the lab
ggaggagatcctgctaattaa

SEQ ID NO: 2335 - DNA, 22 bp, Artificial Sequence
  Made in the lab
aggaggagatcctgctaattaa

SEQ ID NO: 2336 - DNA, 23 bp, Artificial Sequence
  Made in the lab
aaggaggagatcctgctaattaa

SEQ ID NO: 2337 - DNA, 24 bp, Artificial Sequence
  Made in the lab
gaaggaggagatcctgctaattaa

SEQ ID NO: 2338 - DNA, 25 bp, Artificial Sequence
  Made in the lab
ggaaggaggagatcctgctaattaa

SEQ ID NO: 2339 - DNA, 26 bp, Artificial Sequence
  Made in the lab
cggaaggaggagatcctgctaattaa

SEQ ID NO: 2340 - DNA, 27 bp, Artificial Sequence
  Made in the lab
acggaaggaggagatcctgctaattaa

SEQ ID NO: 2341 - DNA, 28 bp, Artificial Sequence
  Made in the lab
cacggaaggaggagatcctgctaattaa

SEQ ID NO: 2342 - DNA, 29 bp, Artificial Sequence
  Made in the lab
gcacggaaggaggagatcctgctaattaa

SEQ ID NO: 2343 - DNA, 30 bp, Artificial Sequence
  Made in the lab
ggcacggaaggaggagatcctgctaattaa

SEQ ID NO: 2344 - DNA, 21 bp, Artificial Sequence
  Made in the lab
gcacggacgcacagtacattc

SEQ ID NO: 2345 - DNA, 22 bp, Artificial Sequence
  Made in the lab
agcacggacgcacagtacattc

SEQ ID NO: 2346 - DNA, 23 bp, Artificial Sequence
  Made in the lab
aagcacggacgcacagtacattc

SEQ ID NO: 2347 - DNA, 24 bp, Artificial Sequence
  Made in the lab
gaagcacggacgcacagtacattc

SEQ ID NO: 2348 - DNA, 25 bp, Artificial Sequence
  Made in the lab
tgaagcacggacgcacagtacattc

SEQ ID NO: 2349 - DNA, 26 bp, Artificial Sequence
  Made in the lab
ctgaagcacggacgcacagtacattc

SEQ ID NO: 2350 - DNA, 27 bp, Artificial Sequence
  Made in the lab
cctgaagcacggacgcacagtacattc

SEQ ID NO: 2351 - DNA, 28 bp, Artificial Sequence
  Made in the lab
acctgaagcacggacgcacagtacattc

SEQ ID NO: 2352 - DNA, 29 bp, Artificial Sequence
  Made in the lab
gacctgaagcacggacgcacagtacattc

SEQ ID NO: 2353 - DNA, 30 bp, Artificial Sequence
  Made in the lab
tgacctgaagcacggacgcacagtacattc

SEQ ID NO: 2354 - DNA, 21 bp, Artificial Sequence
  Made in the lab
ggatgaccagctgaaagttat

SEQ ID NO: 2355 - DNA, 22 bp, Artificial Sequence
  Made in the lab
aggatgaccagctgaaagttat

SEQ ID NO: 2356 - DNA, 23 bp, Artificial Sequence
  Made in the lab
aaggatgaccagctgaaagttat

SEQ ID NO: 2357 - DNA, 24 bp, Artificial Sequence
  Made in the lab
caaggatgaccagctgaaagttat

SEQ ID NO: 2358 - DNA, 25 bp, Artificial Sequence
  Made in the lab
ccaaggatgaccagctgaaagttat

SEQ ID NO: 2359 - DNA, 26 bp, Artificial Sequence
  Made in the lab
gccaaggatgaccagctgaaagttat

SEQ ID NO: 2360 - DNA, 27 bp, Artificial Sequence
  Made in the lab
tgccaaggatgaccagctgaaagttat

SEQ ID NO: 2361 - DNA, 28 bp, Artificial Sequence
  Made in the lab
ttgccaaggatgaccagctgaaagttat

SEQ ID NO: 2362 - DNA, 29 bp, Artificial Sequence
  Made in the lab
attgccaaggatgaccagctgaaagttat

SEQ ID NO: 2363 - DNA, 30 bp, Artificial Sequence
  Made in the lab
cattgccaaggatgaccagctgaaagttat

SEQ ID NO: 2364 - DNA, 21 bp, Artificial Sequence
  Made in the lab
gctttacctcaatgagacctt

SEQ ID NO: 2365 - DNA, 22 bp, Artificial Sequence
  Made in the lab
agctttacctcaatgagacctt

SEQ ID NO: 2366 - DNA, 23 bp, Artificial Sequence
  Made in the lab
aagctttacctcaatgagacctt

SEQ ID NO: 2367 - DNA, 24 bp, Artificial Sequence
  Made in the lab
gaagctttacctcaatgagacctt

SEQ ID NO: 2368 - DNA, 25 bp, Artificial Sequence
  Made in the lab
tgaagctttacctcaatgagacctt

SEQ ID NO: 2369 - DNA, 26 bp, Artificial Sequence
  Made in the lab
ctgaagctttacctcaatgagacctt

SEQ ID NO: 2370 - DNA, 27 bp, Artificial Sequence
  Made in the lab
gctgaagctttacctcaatgagacctt

SEQ ID NO: 2371 - DNA, 28 bp, Artificial Sequence
  Made in the lab
ggctgaagctttacctcaatgagacctt

SEQ ID NO: 2372 - DNA, 29 bp, Artificial Sequence
  Made in the lab
gggctgaagctttacctcaatgagacctt

SEQ ID NO: 2373 - DNA, 30 bp, Artificial Sequence
  Made in the lab
cgggctgaagctttacctcaatgagacctt

SEQ ID NO: 2374 - DNA, 21 bp, Artificial Sequence
  Made in the lab
ggatcagatgtctcacctgtt

SEQ ID NO: 2375 - DNA, 22 bp, Artificial Sequence
  Made in the lab
aggatcagatgtctcacctgtt

SEQ ID NO: 2376 - DNA, 23 bp, Artificial Sequence
  Made in the lab
aaggatcagatgtctcacctgtt

SEQ ID NO: 2377 - DNA, 24 bp, Artificial Sequence
  Made in the lab
caaggatcagatgtctcacctgtt

SEQ ID NO: 2378 - DNA, 25 bp, Artificial Sequence
  Made in the lab
ccaaggatcagatgtctcacctgtt

SEQ ID NO: 2379 - DNA, 26 bp, Artificial Sequence
  Made in the lab
accaaggatcagatgtctcacctgtt

SEQ ID NO: 2380 - DNA, 27 bp, Artificial Sequence
  Made in the lab
caccaaggatcagatgtctcacctgtt

SEQ ID NO: 2381 - DNA, 28 bp, Artificial Sequence
  Made in the lab
tcaccaaggatcagatgtctcacctgtt

SEQ ID NO: 2382 - DNA, 29 bp, Artificial Sequence
  Made in the lab
ttcaccaaggatcagatgtctcacctgtt

SEQ ID NO: 2383 - DNA, 30 bp, Artificial Sequence
  Made in the lab
gttcaccaaggatcagatgtctcacctgtt

SEQ ID NO: 2384 - DNA, 21 bp, Artificial Sequence
  Made in the lab
gcttgctttggtcagttcatc

SEQ ID NO: 2385 - DNA, 22 bp, Artificial Sequence
  Made in the lab
agcttgctttggtcagttcatc

SEQ ID NO: 2386 - DNA, 23 bp, Artificial Sequence
  Made in the lab
aagcttgctttggtcagttcatc

SEQ ID NO: 2387 - DNA, 24 bp, Artificial Sequence
  Made in the lab
gaagcttgctttggtcagttcatc

SEQ ID NO: 2388 - DNA, 25 bp, Artificial Sequence
  Made in the lab
cgaagcttgctttggtcagttcatc

SEQ ID NO: 2389 - DNA, 26 bp, Artificial Sequence
  Made in the lab
acgaagcttgctttggtcagttcatc

SEQ ID NO: 2390 - DNA, 27 bp, Artificial Sequence
  Made in the lab
tacgaagcttgctttggtcagttcatc

SEQ ID NO: 2391 - DNA, 28 bp, Artificial Sequence
  Made in the lab
gtacgaagcttgctttggtcagttcatc

SEQ ID NO: 2392 - DNA, 29 bp, Artificial Sequence
  Made in the lab
agtacgaagcttgctttggtcagttcatc

SEQ ID NO: 2393 - DNA, 30 bp, Artificial Sequence
  Made in the lab
gagtacgaagcttgctttggtcagttcatc

SEQ ID NO: 2394 - DNA, 21 bp, Artificial Sequence
  Made in the lab
ccctgaaggtgtgatcctatc

SEQ ID NO: 2395 - DNA, 22 bp, Artificial Sequence
  Made in the lab
accctgaaggtgtgatcctatc

SEQ ID NO: 2396 - DNA, 23 bp, Artificial Sequence
  Made in the lab
aaccctgaaggtgtgatcctatc

SEQ ID NO: 2397 - DNA, 24 bp, Artificial Sequence
  Made in the lab
gaaccctgaaggtgtgatcctatc

SEQ ID NO: 2398 - DNA, 25 bp, Artificial Sequence
  Made in the lab
agaaccctgaaggtgtgatcctatc

SEQ ID NO: 2399 - DNA, 26 bp, Artificial Sequence
  Made in the lab
gagaaccctgaaggtgtgatcctatc

SEQ ID NO: 2400 - DNA, 27 bp, Artificial Sequence
  Made in the lab
cgagaaccctgaaggtgtgatcctatc

SEQ ID NO: 2401 - DNA, 28 bp, Artificial Sequence
  Made in the lab
tcgagaaccctgaaggtgtgatcctatc

SEQ ID NO: 2402 - DNA, 29 bp, Artificial Sequence
  Made in the lab
ctcgagaaccctgaaggtgtgatcctatc

SEQ ID NO: 2403 - DNA, 30 bp, Artificial Sequence
  Made in the lab
gctcgagaaccctgaaggtgtgatcctatc

SEQ ID NO: 2404 - DNA, 21 bp, Artificial Sequence
  Made in the lab
catggctgtcatcgactgctt

SEQ ID NO: 2405 - DNA, 22 bp, Artificial Sequence
  Made in the lab
acatggctgtcatcgactgctt

SEQ ID NO: 2406 - DNA, 23 bp, Artificial Sequence
  Made in the lab
aacatggctgtcatcgactgctt

SEQ ID NO: 2407 - DNA, 24 bp, Artificial Sequence
  Made in the lab
gaacatggctgtcatcgactgctt

SEQ ID NO: 2408 - DNA, 25 bp, Artificial Sequence
  Made in the lab
agaacatggctgtcatcgactgctt

SEQ ID NO: 2409 - DNA, 26 bp, Artificial Sequence
  Made in the lab
gagaacatggctgtcatcgactgctt

SEQ ID NO: 2410 - DNA, 27 bp, Artificial Sequence
  Made in the lab
ggagaacatggctgtcatcgactgctt

SEQ ID NO: 2411 - DNA, 28 bp, Artificial Sequence
  Made in the lab
gggagaacatggctgtcatcgactgctt

SEQ ID NO: 2412 - DNA, 29 bp, Artificial Sequence
  Made in the lab
tgggagaacatggctgtcatcgactgctt

SEQ ID NO: 2413 - DNA, 30 bp, Artificial Sequence
  Made in the lab
gtgggagaacatggctgtcatcgactgctt

SEQ ID NO: 2414 - DNA, 21 bp, Artificial Sequence
  Made in the lab
taaacagccgagctgtccctt

SEQ ID NO: 2415 - DNA, 22 bp, Artificial Sequence
  Made in the lab
ataaacagccgagctgtccctt

SEQ ID NO: 2416 - DNA, 23 bp, Artificial Sequence
  Made in the lab
aataaacagccgagctgtccctt

SEQ ID NO: 2417 - DNA, 24 bp, Artificial Sequence
  Made in the lab
taataaacagccgagctgtccctt

SEQ ID NO: 2418 - DNA, 25 bp, Artificial Sequence
  Made in the lab
ttaataaacagccgagctgtccctt

SEQ ID NO: 2419 - DNA, 26 bp, Artificial Sequence
  Made in the lab
cttaataaacagccgagctgtccctt

SEQ ID NO: 2420 - DNA, 27 bp, Artificial Sequence
  Made in the lab
acttaataaacagccgagctgtccctt

SEQ ID NO: 2421 - DNA, 28 bp, Artificial Sequence
  Made in the lab
gacttaataaacagccgagctgtccctt

SEQ ID NO: 2422 - DNA, 29 bp, Artificial Sequence
  Made in the lab
tgacttaataaacagccgagctgtccctt

SEQ ID NO: 2423 - DNA, 30 bp, Artificial Sequence
  Made in the lab
ctgacttaataaacagccgagctgtccctt

SEQ ID NO: 2424 - DNA, 21 bp, Artificial Sequence
  Made in the lab
cgtacgtgtctctcgctcctt

SEQ ID NO: 2425 - DNA, 22 bp, Artificial Sequence
  Made in the lab
acgtacgtgtctctcgctcctt

SEQ ID NO: 2426 - DNA, 23 bp, Artificial Sequence
  Made in the lab
aacgtacgtgtctctcgctcctt

SEQ ID NO: 2427 - DNA, 24 bp, Artificial Sequence
  Made in the lab
caacgtacgtgtctctcgctcctt

SEQ ID NO: 2428 - DNA, 25 bp, Artificial Sequence
  Made in the lab
gcaacgtacgtgtctctcgctcctt

SEQ ID NO: 2429 - DNA, 26 bp, Artificial Sequence
  Made in the lab
tgcaacgtacgtgtctctcgctcctt

SEQ ID NO: 2430 - DNA, 27 bp, Artificial Sequence
  Made in the lab
atgcaacgtacgtgtctctcgctcctt

SEQ ID NO: 2431 - DNA, 28 bp, Artificial Sequence
  Made in the lab
aatgcaacgtacgtgtctctcgctcctt

SEQ ID NO: 2432 - DNA, 29 bp, Artificial Sequence
  Made in the lab
gaatgcaacgtacgtgtctctcgctcctt

SEQ ID NO: 2433 - DNA, 30 bp, Artificial Sequence
  Made in the lab
tgaatgcaacgtacgtgtctctcgctcctt

SEQ ID NO: 2434 - DNA, 21 bp, Artificial Sequence
  Made in the lab
ggccatgctaagcactggctt

SEQ ID NO: 2435 - DNA, 22 bp, Artificial Sequence
  Made in the lab
aggccatgctaagcactggctt

SEQ ID NO: 2436 - DNA, 23 bp, Artificial Sequence
  Made in the lab
aaggccatgctaagcactggctt

SEQ ID NO: 2437 - DNA, 24 bp, Artificial Sequence
  Made in the lab
caaggccatgctaagcactggctt

SEQ ID NO: 2438 - DNA, 25 bp, Artificial Sequence
  Made in the lab
tcaaggccatgctaagcactggctt

SEQ ID NO: 2439 - DNA, 26 bp, Artificial Sequence
  Made in the lab
ctcaaggccatgctaagcactggctt

SEQ ID NO: 2440 - DNA, 27 bp, Artificial Sequence
  Made in the lab
cctcaaggccatgctaagcactggctt

SEQ ID NO: 2441 - DNA, 28 bp, Artificial Sequence
  Made in the lab
acctcaaggccatgctaagcactggctt

SEQ ID NO: 2442 - DNA, 29 bp, Artificial Sequence
  Made in the lab
tacctcaaggccatgctaagcactggctt

SEQ ID NO: 2443 - DNA, 30 bp, Artificial Sequence
  Made in the lab
atacctcaaggccatgctaagcactggctt

SEQ ID NO: 2444 - DNA, 21 bp, Artificial Sequence
  Made in the lab
cagctgtggactggcactttg

SEQ ID NO: 2445 - DNA, 22 bp, Artificial Sequence
  Made in the lab
acagctgtggactggcactttg

SEQ ID NO: 2446 - DNA, 23 bp, Artificial Sequence
  Made in the lab
aacagctgtggactggcactttg

SEQ ID NO: 2447 - DNA, 24 bp, Artificial Sequence
  Made in the lab
taacagctgtggactggcactttg

SEQ ID NO: 2448 - DNA, 25 bp, Artificial Sequence
  Made in the lab
gtaacagctgtggactggcactttg

SEQ ID NO: 2449 - DNA, 26 bp, Artificial Sequence
  Made in the lab
ggtaacagctgtggactggcactttg

SEQ ID NO: 2450 - DNA, 27 bp, Artificial Sequence
  Made in the lab
aggtaacagctgtggactggcactttg

SEQ ID NO: 2451 - DNA, 28 bp, Artificial Sequence
  Made in the lab
aaggtaacagctgtggactggcactttg

SEQ ID NO: 2452 - DNA, 29 bp, Artificial Sequence
  Made in the lab
caaggtaacagctgtggactggcactttg

SEQ ID NO: 2453 - DNA, 30 bp, Artificial Sequence
  Made in the lab
tcaaggtaacagctgtggactggcactttg

SEQ ID NO: 2454 - DNA, 21 bp, Artificial Sequence
  Made in the lab
ggcccactggacaccttttga

SEQ ID NO: 2455 - DNA, 22 bp, Artificial Sequence
  Made in the lab
aggcccactggacaccttttga

SEQ ID NO: 2456 - DNA, 23 bp, Artificial Sequence
  Made in the lab
aaggcccactggacaccttttga

SEQ ID NO: 2457 - DNA, 24 bp, Artificial Sequence
  Made in the lab
caaggcccactggacaccttttga

SEQ ID NO: 2458 - DNA, 25 bp, Artificial Sequence
  Made in the lab
ccaaggcccactggacaccttttga

SEQ ID NO: 2459 - DNA, 26 bp, Artificial Sequence
  Made in the lab
tccaaggcccactggacaccttttga

SEQ ID NO: 2460 - DNA, 27 bp, Artificial Sequence
  Made in the lab
ctccaaggcccactggacaccttttga

SEQ ID NO: 2461 - DNA, 28 bp, Artificial Sequence
  Made in the lab
tctccaaggcccactggacaccttttga

SEQ ID NO: 2462 - DNA, 29 bp, Artificial Sequence
  Made in the lab
ttctccaaggcccactggacaccttttga

SEQ ID NO: 2463 - DNA, 30 bp, Artificial Sequence
  Made in the lab
cttctccaaggcccactggacaccttttga

SEQ ID NO: 2464 - DNA, 21 bp, Artificial Sequence
  Made in the lab
gcttgtgcgactgccgggatt

SEQ ID NO: 2465 - DNA, 22 bp, Artificial Sequence
  Made in the lab
agcttgtgcgactgccgggatt

SEQ ID NO: 2466 - DNA, 23 bp, Artificial Sequence
  Made in the lab
aagcttgtgcgactgccgggatt

SEQ ID NO: 2467 - DNA, 24 bp, Artificial Sequence
  Made in the lab
aaagcttgtgcgactgccgggatt

SEQ ID NO: 2468 - DNA, 25 bp, Artificial Sequence
  Made in the lab
aaaagcttgtgcgactgccgggatt

SEQ ID NO: 2469 - DNA, 26 bp, Artificial Sequence
  Made in the lab
caaaagcttgtgcgactgccgggatt

SEQ ID NO: 2470 - DNA, 27 bp, Artificial Sequence
  Made in the lab
ccaaaagcttgtgcgactgccgggatt

SEQ ID NO: 2471 - DNA, 28 bp, Artificial Sequence
  Made in the lab
cccaaaagcttgtgcgactgccgggatt

SEQ ID NO: 2472 - DNA, 29 bp, Artificial Sequence
  Made in the lab
tcccaaaagcttgtgcgactgccgggatt

SEQ ID NO: 2473 - DNA, 30 bp, Artificial Sequence
  Made in the lab
ctcccaaaagcttgtgcgactgccgggatt

SEQ ID NO: 2474 - DNA, 21 bp, Artificial Sequence
  Made in the lab
accgtggctgctgtcctcatg

SEQ ID NO: 2475 - DNA, 22 bp, Artificial Sequence
  Made in the lab
aaccgtggctgctgtcctcatg

SEQ ID NO: 2476 - DNA, 23 bp, Artificial Sequence
  Made in the lab
aaaccgtggctgctgtcctcatg

SEQ ID NO: 2477 - DNA, 24 bp, Artificial Sequence
  Made in the lab
caaaccgtggctgctgtcctcatg

SEQ ID NO: 2478 - DNA, 25 bp, Artificial Sequence
  Made in the lab
gcaaaccgtggctgctgtcctcatg

SEQ ID NO: 2479 - DNA, 26 bp, Artificial Sequence
  Made in the lab
agcaaaccgtggctgctgtcctcatg

SEQ ID NO: 2480 - DNA, 27 bp, Artificial Sequence
  Made in the lab
cagcaaaccgtggctgctgtcctcatg

SEQ ID NO: 2481 - DNA, 28 bp, Artificial Sequence
  Made in the lab
gcagcaaaccgtggctgctgtcctcatg

SEQ ID NO: 2482 - DNA, 29 bp, Artificial Sequence
  Made in the lab
agcagcaaaccgtggctgctgtcctcatg

SEQ ID NO: 2483 - DNA, 30 bp, Artificial Sequence
  Made in the lab
gagcagcaaaccgtggctgctgtcctcatg

SEQ ID NO: 2484 - DNA, 21 bp, Artificial Sequence
  Made in the lab
ccagctgaaagttattgaatg

SEQ ID NO: 2485 - DNA, 22 bp, Artificial Sequence
  Made in the lab
accagctgaaagttattgaatg

SEQ ID NO: 2486 - DNA, 23 bp, Artificial Sequence
  Made in the lab
gaccagctgaaagttattgaatg

SEQ ID NO: 2487 - DNA, 24 bp, Artificial Sequence
  Made in the lab
tgaccagctgaaagttattgaatg

SEQ ID NO: 2488 - DNA, 25 bp, Artificial Sequence
  Made in the lab
atgaccagctgaaagttattgaatg

SEQ ID NO: 2489 - DNA, 26 bp, Artificial Sequence
  Made in the lab
gatgaccagctgaaagttattgaatg

SEQ ID NO: 2490 - DNA, 27 bp, Artificial Sequence
  Made in the lab
ggatgaccagctgaaagttattgaatg

SEQ ID NO: 2491 - DNA, 28 bp, Artificial Sequence
  Made in the lab
aggatgaccagctgaaagttattgaatg

SEQ ID NO: 2492 - DNA, 29 bp, Artificial Sequence
  Made in the lab
aaggatgaccagctgaaagttattgaatg

SEQ ID NO: 2493 - DNA, 30 bp, Artificial Sequence
  Made in the lab
caaggatgaccagctgaaagttattgaatg

SEQ ID NO: 2494 - DNA, 21 bp, Artificial Sequence
  Made in the lab
aggaggagatcctgctaatta

SEQ ID NO: 2495 - DNA, 22 bp, Artificial Sequence
  Made in the lab
aaggaggagatcctgctaatta

SEQ ID NO: 2496 - DNA, 23 bp, Artificial Sequence
  Made in the lab
gaaggaggagatcctgctaatta

SEQ ID NO: 2497 - DNA, 24 bp, Artificial Sequence
  Made in the lab
ggaaggaggagatcctgctaatta

SEQ ID NO: 2498 - DNA, 25 bp, Artificial Sequence
  Made in the lab
cggaaggaggagatcctgctaatta

SEQ ID NO: 2499 - DNA, 26 bp, Artificial Sequence
  Made in the lab
acggaaggaggagatcctgctaatta

SEQ ID NO: 2500 - DNA, 27 bp, Artificial Sequence
  Made in the lab
cacggaaggaggagatcctgctaatta

SEQ ID NO: 2501 - DNA, 28 bp, Artificial Sequence
  Made in the lab
gcacggaaggaggagatcctgctaatta

SEQ ID NO: 2502 - DNA, 29 bp, Artificial Sequence
  Made in the lab
ggcacggaaggaggagatcctgctaatta

SEQ ID NO: 2503 - DNA, 30 bp, Artificial Sequence
  Made in the lab
tggcacggaaggaggagatcctgctaatta

SEQ ID NO: 2504 - DNA, 21 bp, Artificial Sequence
  Made in the lab
gaccatcatggtgaactataa

SEQ ID NO: 2505 - DNA, 22 bp, Artificial Sequence
  Made in the lab
agaccatcatggtgaactataa

SEQ ID NO: 2506 - DNA, 23 bp, Artificial Sequence
  Made in the lab
aagaccatcatggtgaactataa

SEQ ID NO: 2507 - DNA, 24 bp, Artificial Sequence
  Made in the lab
taagaccatcatggtgaactataa

SEQ ID NO: 2508 - DNA, 25 bp, Artificial Sequence
  Made in the lab
ataagaccatcatggtgaactataa

SEQ ID NO: 2509 - DNA, 26 bp, Artificial Sequence
  Made in the lab
tataagaccatcatggtgaactataa

SEQ ID NO: 2510 - DNA, 27 bp, Artificial Sequence
  Made in the lab
atataagaccatcatggtgaactataa

SEQ ID NO: 2511 - DNA, 28 bp, Artificial Sequence
  Made in the lab
gatataagaccatcatggtgaactataa

SEQ ID NO: 2512 - DNA, 29 bp, Artificial Sequence
  Made in the lab
ggatataagaccatcatggtgaactataa

SEQ ID NO: 2513 - DNA, 30 bp, Artificial Sequence
  Made in the lab
gggatataagaccatcatggtgaactataa

SEQ ID NO: 2514 - DNA, 21 bp, Artificial Sequence
  Made in the lab
cgagtcatgtttgacaaaatt

SEQ ID NO: 2515 - DNA, 22 bp, Artificial Sequence
  Made in the lab
acgagtcatgtttgacaaaatt

SEQ ID NO: 2516 - DNA, 23 bp, Artificial Sequence
  Made in the lab
aacgagtcatgtttgacaaaatt

SEQ ID NO: 2517 - DNA, 24 bp, Artificial Sequence
  Made in the lab
gaacgagtcatgtttgacaaaatt

SEQ ID NO: 2518 - DNA, 25 bp, Artificial Sequence
  Made in the lab
agaacgagtcatgtttgacaaaatt

SEQ ID NO: 2519 - DNA, 26 bp, Artificial Sequence
  Made in the lab
aagaacgagtcatgtttgacaaaatt

SEQ ID NO: 2520 - DNA, 27 bp, Artificial Sequence
  Made in the lab
caagaacgagtcatgtttgacaaaatt

SEQ ID NO: 2521 - DNA, 28 bp, Artificial Sequence
  Made in the lab
ccaagaacgagtcatgtttgacaaaatt

SEQ ID NO: 2522 - DNA, 29 bp, Artificial Sequence
  Made in the lab
gccaagaacgagtcatgtttgacaaaatt

SEQ ID NO: 2523 - DNA, 30 bp, Artificial Sequence
  Made in the lab
cgccaagaacgagtcatgtttgacaaaatt

SEQ ID NO: 2524 - DNA, 21 bp, Artificial Sequence
  Made in the lab
gacgctagagcggtcttattt

SEQ ID NO: 2525 - DNA, 22 bp, Artificial Sequence
  Made in the lab
agacgctagagcggtcttattt

SEQ ID NO: 2526 - DNA, 23 bp, Artificial Sequence
  Made in the lab
aagacgctagagcggtcttattt

SEQ ID NO: 2527 - DNA, 24 bp, Artificial Sequence
  Made in the lab
taagacgctagagcggtcttattt

SEQ ID NO: 2528 - DNA, 25 bp, Artificial Sequence
  Made in the lab
ttaagacgctagagcggtcttattt

SEQ ID NO: 2529 - DNA, 26 bp, Artificial Sequence
  Made in the lab
tttaagacgctagagcggtcttattt

SEQ ID NO: 2530 - DNA, 27 bp, Artificial Sequence
  Made in the lab
ctttaagacgctagagcggtcttattt

SEQ ID NO: 2531 - DNA, 28 bp, Artificial Sequence
  Made in the lab
gctttaagacgctagagcggtcttattt

SEQ ID NO: 2532 - DNA, 29 bp, Artificial Sequence
  Made in the lab
ggctttaagacgctagagcggtcttattt

SEQ ID NO: 2533 - DNA, 30 bp, Artificial Sequence
  Made in the lab
cggctttaagacgctagagcggtcttattt

SEQ ID NO: 2534 - DNA, 21 bp, Artificial Sequence
  Made in the lab
gttggctgaagtcactaaagt

SEQ ID NO: 2535 - DNA, 22 bp, Artificial Sequence
  Made in the lab
agttggctgaagtcactaaagt

SEQ ID NO: 2536 - DNA, 23 bp, Artificial Sequence
  Made in the lab
aagttggctgaagtcactaaagt

SEQ ID NO: 2537 - DNA, 24 bp, Artificial Sequence
  Made in the lab
gaagttggctgaagtcactaaagt

SEQ ID NO: 2538 - DNA, 25 bp, Artificial Sequence
  Made in the lab
agaagttggctgaagtcactaaagt

SEQ ID NO: 2539 - DNA, 26 bp, Artificial Sequence
  Made in the lab
aagaagttggctgaagtcactaaagt

SEQ ID NO: 2540 - DNA, 27 bp, Artificial Sequence
  Made in the lab
taagaagttggctgaagtcactaaagt

SEQ ID NO: 2541 - DNA, 28 bp, Artificial Sequence
  Made in the lab
ttaagaagttggctgaagtcactaaagt

SEQ ID NO: 2542 - DNA, 29 bp, Artificial Sequence
  Made in the lab
tttaagaagttggctgaagtcactaaagt

SEQ ID NO: 2543 - DNA, 30 bp, Artificial Sequence
  Made in the lab
ctttaagaagttggctgaagtcactaaagt

SEQ ID NO: 2544 - DNA, 21 bp, Artificial Sequence
  Made in the lab
acagctgcaaccttgactact

SEQ ID NO: 2545 - DNA, 22 bp, Artificial Sequence
  Made in the lab
aacagctgcaaccttgactact

SEQ ID NO: 2546 - DNA, 23 bp, Artificial Sequence
  Made in the lab
aaacagctgcaaccttgactact

SEQ ID NO: 2547 - DNA, 24 bp, Artificial Sequence
  Made in the lab
gaaacagctgcaaccttgactact

SEQ ID NO: 2548 - DNA, 25 bp, Artificial Sequence
  Made in the lab
tgaaacagctgcaaccttgactact

SEQ ID NO: 2549 - DNA, 26 bp, Artificial Sequence
  Made in the lab
ctgaaacagctgcaaccttgactact

SEQ ID NO: 2550 - DNA, 27 bp, Artificial Sequence
  Made in the lab
gctgaaacagctgcaaccttgactact

SEQ ID NO: 2551 - DNA, 28 bp, Artificial Sequence
  Made in the lab
tgctgaaacagctgcaaccttgactact

SEQ ID NO: 2552 - DNA, 29 bp, Artificial Sequence
  Made in the lab
ctgctgaaacagctgcaaccttgactact

SEQ ID NO: 2553 - DNA, 30 bp, Artificial Sequence
  Made in the lab
gctgctgaaacagctgcaaccttgactact

SEQ ID NO: 2554 - DNA, 21 bp, Artificial Sequence
  Made in the lab
tggaaaagtggctgaaagacc

SEQ ID NO: 2555 - DNA, 22 bp, Artificial Sequence
  Made in the lab
atggaaaagtggctgaaagacc

SEQ ID NO: 2556 - DNA, 23 bp, Artificial Sequence
  Made in the lab
aatggaaaagtggctgaaagacc

SEQ ID NO: 2557 - DNA, 24 bp, Artificial Sequence
  Made in the lab
caatggaaaagtggctgaaagacc

SEQ ID NO: 2558 - DNA, 25 bp, Artificial Sequence
  Made in the lab
tcaatggaaaagtggctgaaagacc

SEQ ID NO: 2559 - DNA, 26 bp, Artificial Sequence
  Made in the lab
atcaatggaaaagtggctgaaagacc

SEQ ID NO: 2560 - DNA, 27 bp, Artificial Sequence
  Made in the lab
gatcaatggaaaagtggctgaaagacc

SEQ ID NO: 2561 - DNA, 28 bp, Artificial Sequence
  Made in the lab
agatcaatggaaaagtggctgaaagacc

SEQ ID NO: 2562 - DNA, 29 bp, Artificial Sequence
  Made in the lab
aagatcaatggaaaagtggctgaaagacc

SEQ ID NO: 2563 - DNA, 30 bp, Artificial Sequence
  Made in the lab
gaagatcaatggaaaagtggctgaaagacc

SEQ ID NO: 2564 - DNA, 21 bp, Artificial Sequence
  Made in the lab
gaagagaaggagaggaacaca

SEQ ID NO: 2565 - DNA, 22 bp, Artificial Sequence
  Made in the lab
agaagagaaggagaggaacaca

SEQ ID NO: 2566 - DNA, 23 bp, Artificial Sequence
  Made in the lab
aagaagagaaggagaggaacaca

SEQ ID NO: 2567 - DNA, 24 bp, Artificial Sequence
  Made in the lab
gaagaagagaaggagaggaacaca

SEQ ID NO: 2568 - DNA, 25 bp, Artificial Sequence
  Made in the lab
ggaagaagagaaggagaggaacaca

SEQ ID NO: 2569 - DNA, 26 bp, Artificial Sequence
  Made in the lab
aggaagaagagaaggagaggaacaca

SEQ ID NO: 2570 - DNA, 27 bp, Artificial Sequence
  Made in the lab
gaggaagaagagaaggagaggaacaca

SEQ ID NO: 2571 - DNA, 28 bp, Artificial Sequence
  Made in the lab
agaggaagaagagaaggagaggaacaca

SEQ ID NO: 2572 - DNA, 29 bp, Artificial Sequence
  Made in the lab
aagaggaagaagagaaggagaggaacaca

SEQ ID NO: 2573 - DNA, 30 bp, Artificial Sequence
  Made in the lab
aaagaggaagaagagaaggagaggaacaca

SEQ ID NO: 2574 - DNA, 21 bp, Artificial Sequence
  Made in the lab
gaggaagaagagaaggagagg

SEQ ID NO: 2575 - DNA, 22 bp, Artificial Sequence
  Made in the lab
agaggaagaagagaaggagagg

SEQ ID NO: 2576 - DNA, 23 bp, Artificial Sequence
  Made in the lab
aagaggaagaagagaaggagagg

SEQ ID NO: 2577 - DNA, 24 bp, Artificial Sequence
  Made in the lab
aaagaggaagaagagaaggagagg

SEQ ID NO: 2578 - DNA, 25 bp, Artificial Sequence
  Made in the lab
aaaagaggaagaagagaaggagagg

SEQ ID NO: 2579 - DNA, 26 bp, Artificial Sequence
  Made in the lab
caaaagaggaagaagagaaggagagg

SEQ ID NO: 2580 - DNA, 27 bp, Artificial Sequence
  Made in the lab
tcaaaagaggaagaagagaaggagagg

SEQ ID NO: 2581 - DNA, 28 bp, Artificial Sequence
  Made in the lab
atcaaaagaggaagaagagaaggagagg

SEQ ID NO: 2582 - DNA, 29 bp, Artificial Sequence
  Made in the lab
tatcaaaagaggaagaagagaaggagagg

SEQ ID NO: 2583 - DNA, 30 bp, Artificial Sequence
  Made in the lab
gtatcaaaagaggaagaagagaaggagagg

SEQ ID NO: 2584 - DNA, 21 bp, Artificial Sequence
  Made in the lab
tccacaaagaagacattgatg

SEQ ID NO: 2585 - DNA, 22 bp, Artificial Sequence
  Made in the lab
atccacaaagaagacattgatg

SEQ ID NO: 2586 - DNA, 23 bp, Artificial Sequence
  Made in the lab
gatccacaaagaagacattgatg

SEQ ID NO: 2587 - DNA, 24 bp, Artificial Sequence
  Made in the lab
ggatccacaaagaagacattgatg

SEQ ID NO: 2588 - DNA, 25 bp, Artificial Sequence
  Made in the lab
gggatccacaaagaagacattgatg

SEQ ID NO: 2589 - DNA, 26 bp, Artificial Sequence
  Made in the lab
tgggatccacaaagaagacattgatg

SEQ ID NO: 2590 - DNA, 27 bp, Artificial Sequence
  Made in the lab
ttgggatccacaaagaagacattgatg

SEQ ID NO: 2591 - DNA, 28 bp, Artificial Sequence
  Made in the lab
gttgggatccacaaagaagacattgatg

SEQ ID NO: 2592 - DNA, 29 bp, Artificial Sequence
  Made in the lab
tgttgggatccacaaagaagacattgatg

SEQ ID NO: 2593 - DNA, 30 bp, Artificial Sequence
  Made in the lab
ctgttgggatccacaaagaagacattgatg

SEQ ID NO: 2594 - DNA, 21 bp, Artificial Sequence
  Made in the lab
gctgcaaccttgactactaag

SEQ ID NO: 2595 - DNA, 22 bp, Artificial Sequence
  Made in the lab
agctgcaaccttgactactaag

SEQ ID NO: 2596 - DNA, 23 bp, Artificial Sequence
  Made in the lab
cagctgcaaccttgactactaag

SEQ ID NO: 2597 - DNA, 24 bp, Artificial Sequence
  Made in the lab
acagctgcaaccttgactactaag

SEQ ID NO: 2598 - DNA, 25 bp, Artificial Sequence
  Made in the lab
aacagctgcaaccttgactactaag

SEQ ID NO: 2599 - DNA, 26 bp, Artificial Sequence
  Made in the lab
aaacagctgcaaccttgactactaag

SEQ ID NO: 2600 - DNA, 27 bp, Artificial Sequence
  Made in the lab
gaaacagctgcaaccttgactactaag

SEQ ID NO: 2601 - DNA, 28 bp, Artificial Sequence
  Made in the lab
tgaaacagctgcaaccttgactactaag

SEQ ID NO: 2602 - DNA, 29 bp, Artificial Sequence
  Made in the lab
ctgaaacagctgcaaccttgactactaag

SEQ ID NO: 2603 - DNA, 30 bp, Artificial Sequence
  Made in the lab
gctgaaacagctgcaaccttgactactaag

SEQ ID NO: 2604 - DNA, 21 bp, Artificial Sequence
  Made in the lab
gctttgttatggactcaatat

SEQ ID NO: 2605 - DNA, 22 bp, Artificial Sequence
  Made in the lab
agctttgttatggactcaatat

SEQ ID NO: 2606 - DNA, 23 bp, Artificial Sequence
  Made in the lab
aagctttgttatggactcaatat

SEQ ID NO: 2607 - DNA, 24 bp, Artificial Sequence
  Made in the lab
gaagctttgttatggactcaatat

SEQ ID NO: 2608 - DNA, 25 bp, Artificial Sequence
  Made in the lab
agaagctttgttatggactcaatat

SEQ ID NO: 2609 - DNA, 26 bp, Artificial Sequence
  Made in the lab
cagaagctttgttatggactcaatat

SEQ ID NO: 2610 - DNA, 27 bp, Artificial Sequence
  Made in the lab
ccagaagctttgttatggactcaatat

SEQ ID NO: 2611 - DNA, 28 bp, Artificial Sequence
  Made in the lab
tccagaagctttgttatggactcaatat

SEQ ID NO: 2612 - DNA, 29 bp, Artificial Sequence
  Made in the lab
atccagaagctttgttatggactcaatat

SEQ ID NO: 2613 - DNA, 30 bp, Artificial Sequence
  Made in the lab
aatccagaagctttgttatggactcaatat

SEQ ID NO: 2614 - DNA, 21 bp, Artificial Sequence
  Made in the lab
ggaattcttcagtatgatatg

SEQ ID NO: 2615 - DNA, 22 bp, Artificial Sequence
  Made in the lab
aggaattcttcagtatgatatg

SEQ ID NO: 2616 - DNA, 23 bp, Artificial Sequence
  Made in the lab
aaggaattcttcagtatgatatg

SEQ ID NO: 2617 - DNA, 24 bp, Artificial Sequence
  Made in the lab
aaaggaattcttcagtatgatatg

SEQ ID NO: 2618 - DNA, 25 bp, Artificial Sequence
  Made in the lab
caaaggaattcttcagtatgatatg

SEQ ID NO: 2619 - DNA, 26 bp, Artificial Sequence
  Made in the lab
gcaaaggaattcttcagtatgatatg

SEQ ID NO: 2620 - DNA, 27 bp, Artificial Sequence
  Made in the lab
agcaaaggaattcttcagtatgatatg

SEQ ID NO: 2621 - DNA, 28 bp, Artificial Sequence
  Made in the lab
tagcaaaggaattcttcagtatgatatg

SEQ ID NO: 2622 - DNA, 29 bp, Artificial Sequence
  Made in the lab
ttagcaaaggaattcttcagtatgatatg

SEQ ID NO: 2623 - DNA, 30 bp, Artificial Sequence
  Made in the lab
gttagcaaaggaattcttcagtatgatatg

SEQ ID NO: 2624 - DNA, 21 bp, Artificial Sequence
  Made in the lab
gactgggatgtattatttaag

SEQ ID NO: 2625 - DNA, 22 bp, Artificial Sequence
  Made in the lab
agactgggatgtattatttaag

SEQ ID NO: 2626 - DNA, 23 bp, Artificial Sequence
  Made in the lab
aagactgggatgtattatttaag

SEQ ID NO: 2627 - DNA, 24 bp, Artificial Sequence
  Made in the lab
gaagactgggatgtattatttaag

SEQ ID NO: 2628 - DNA, 25 bp, Artificial Sequence
  Made in the lab
tgaagactgggatgtattatttaag

SEQ ID NO: 2629 - DNA, 26 bp, Artificial Sequence
  Made in the lab
ttgaagactgggatgtattatttaag

SEQ ID NO: 2630 - DNA, 27 bp, Artificial Sequence
  Made in the lab
tttgaagactgggatgtattatttaag

SEQ ID NO: 2631 - DNA, 28 bp, Artificial Sequence
  Made in the lab
gtttgaagactgggatgtattatttaag

SEQ ID NO: 2632 - DNA, 29 bp, Artificial Sequence
  Made in the lab
ggtttgaagactgggatgtattatttaag

SEQ ID NO: 2633 - DNA, 30 bp, Artificial Sequence
  Made in the lab
gggtttgaagactgggatgtattatttaag

SEQ ID NO: 2634 - DNA, 21 bp, Artificial Sequence
  Made in the lab
ggagaagctaaaagataaaga

SEQ ID NO: 2635 - DNA, 22 bp, Artificial Sequence
  Made in the lab
aggagaagctaaaagataaaga

SEQ ID NO: 2636 - DNA, 23 bp, Artificial Sequence
  Made in the lab
aaggagaagctaaaagataaaga

SEQ ID NO: 2637 - DNA, 24 bp, Artificial Sequence
  Made in the lab
taaggagaagctaaaagataaaga

SEQ ID NO: 2638 - DNA, 25 bp, Artificial Sequence
  Made in the lab
ataaggagaagctaaaagataaaga

SEQ ID NO: 2639 - DNA, 26 bp, Artificial Sequence
  Made in the lab
aataaggagaagctaaaagataaaga

SEQ ID NO: 2640 - DNA, 27 bp, Artificial Sequence
  Made in the lab
aaataaggagaagctaaaagataaaga

SEQ ID NO: 2641 - DNA, 28 bp, Artificial Sequence
  Made in the lab
taaataaggagaagctaaaagataaaga

SEQ ID NO: 2642 - DNA, 29 bp, Artificial Sequence
  Made in the lab
ctaaataaggagaagctaaaagataaaga

SEQ ID NO: 2643 - DNA, 30 bp, Artificial Sequence
  Made in the lab
tctaaataaggagaagctaaaagataaaga

SEQ ID NO: 2644 - DNA, 21 bp, Artificial Sequence
  Made in the lab
actacttcttgagcatagata

SEQ ID NO: 2645 - DNA, 22 bp, Artificial Sequence
  Made in the lab
aactacttcttgagcatagata

SEQ ID NO: 2646 - DNA, 23 bp, Artificial Sequence
  Made in the lab
aaactacttcttgagcatagata

SEQ ID NO: 2647 - DNA, 24 bp, Artificial Sequence
  Made in the lab
caaactacttcttgagcatagata

SEQ ID NO: 2648 - DNA, 25 bp, Artificial Sequence
  Made in the lab
ccaaactacttcttgagcatagata

SEQ ID NO: 2649 - DNA, 26 bp, Artificial Sequence
  Made in the lab
gccaaactacttcttgagcatagata

SEQ ID NO: 2650 - DNA, 27 bp, Artificial Sequence
  Made in the lab
agccaaactacttcttgagcatagata

SEQ ID NO: 2651 - DNA, 28 bp, Artificial Sequence
  Made in the lab
tagccaaactacttcttgagcatagata

SEQ ID NO: 2652 - DNA, 29 bp, Artificial Sequence
  Made in the lab
gtagccaaactacttcttgagcatagata

SEQ ID NO: 2653 - DNA, 30 bp, Artificial Sequence
  Made in the lab
agtagccaaactacttcttgagcatagata

SEQ ID NO: 2654 - DNA, 21 bp, Artificial Sequence
  Made in the lab
cggatatattgagaatcaaag

SEQ ID NO: 2655 - DNA, 22 bp, Artificial Sequence
  Made in the lab
acggatatattgagaatcaaag

SEQ ID NO: 2656 - DNA, 23 bp, Artificial Sequence
  Made in the lab
aacggatatattgagaatcaaag

SEQ ID NO: 2657 - DNA, 24 bp, Artificial Sequence
  Made in the lab
aaacggatatattgagaatcaaag

SEQ ID NO: 2658 - DNA, 25 bp, Artificial Sequence
  Made in the lab
aaaacggatatattgagaatcaaag

SEQ ID NO: 2659 - DNA, 26 bp, Artificial Sequence
  Made in the lab
aaaaacggatatattgagaatcaaag

SEQ ID NO: 2660 - DNA, 27 bp, Artificial Sequence
  Made in the lab
aaaaaacggatatattgagaatcaaag

SEQ ID NO: 2661 - DNA, 28 bp, Artificial Sequence
  Made in the lab
aaaaaaacggatatattgagaatcaaag

SEQ ID NO: 2662 - DNA, 29 bp, Artificial Sequence
  Made in the lab
aaaaaaaacggatatattgagaatcaaag

SEQ ID NO: 2663 - DNA, 30 bp, Artificial Sequence
  Made in the lab
aaaaaaaaacggatatattgagaatcaaag

SEQ ID NO: 2664 - DNA, 21 bp, Artificial Sequence
  Made in the lab
gaacgagtcatgtttgacaaa

SEQ ID NO: 2665 - DNA, 22 bp, Artificial Sequence
  Made in the lab
agaacgagtcatgtttgacaaa

SEQ ID NO: 2666 - DNA, 23 bp, Artificial Sequence
  Made in the lab
aagaacgagtcatgtttgacaaa

SEQ ID NO: 2667 - DNA, 24 bp, Artificial Sequence
  Made in the lab
caagaacgagtcatgtttgacaaa

SEQ ID NO: 2668 - DNA, 25 bp, Artificial Sequence
  Made in the lab
ccaagaacgagtcatgtttgacaaa

SEQ ID NO: 2669 - DNA, 26 bp, Artificial Sequence
  Made in the lab
gccaagaacgagtcatgtttgacaaa

SEQ ID NO: 2670 - DNA, 27 bp, Artificial Sequence
  Made in the lab
cgccaagaacgagtcatgtttgacaaa

SEQ ID NO: 2671 - DNA, 28 bp, Artificial Sequence
  Made in the lab
ccgccaagaacgagtcatgtttgacaaa

SEQ ID NO: 2672 - DNA, 29 bp, Artificial Sequence
  Made in the lab
gccgccaagaacgagtcatgtttgacaaa

SEQ ID NO: 2673 - DNA, 30 bp, Artificial Sequence
  Made in the lab
ggccgccaagaacgagtcatgtttgacaaa

SEQ ID NO: 2674 - DNA, 21 bp, Artificial Sequence
  Made in the lab
agaccacaacatatgttgatg

SEQ ID NO: 2675 - DNA, 22 bp, Artificial Sequence
  Made in the lab
aagaccacaacatatgttgatg

SEQ ID NO: 2676 - DNA, 23 bp, Artificial Sequence
  Made in the lab
aaagaccacaacatatgttgatg

SEQ ID NO: 2677 - DNA, 24 bp, Artificial Sequence
  Made in the lab
gaaagaccacaacatatgttgatg

SEQ ID NO: 2678 - DNA, 25 bp, Artificial Sequence
  Made in the lab
tgaaagaccacaacatatgttgatg

SEQ ID NO: 2679 - DNA, 26 bp, Artificial Sequence
  Made in the lab
ctgaaagaccacaacatatgttgatg

SEQ ID NO: 2680 - DNA, 27 bp, Artificial Sequence
  Made in the lab
gctgaaagaccacaacatatgttgatg

SEQ ID NO: 2681 - DNA, 28 bp, Artificial Sequence
  Made in the lab
ggctgaaagaccacaacatatgttgatg

SEQ ID NO: 2682 - DNA, 29 bp, Artificial Sequence
  Made in the lab
tggctgaaagaccacaacatatgttgatg

SEQ ID NO: 2683 - DNA, 30 bp, Artificial Sequence
  Made in the lab
gtggctgaaagaccacaacatatgttgatg

SEQ ID NO: 2684 - DNA, 21 bp, Artificial Sequence
  Made in the lab
ggcatttatgacactctaaag

SEQ ID NO: 2685 - DNA, 22 bp, Artificial Sequence
  Made in the lab
aggcatttatgacactctaaag

SEQ ID NO: 2686 - DNA, 23 bp, Artificial Sequence
  Made in the lab
aaggcatttatgacactctaaag

SEQ ID NO: 2687 - DNA, 24 bp, Artificial Sequence
  Made in the lab
gaaggcatttatgacactctaaag

SEQ ID NO: 2688 - DNA, 25 bp, Artificial Sequence
  Made in the lab
tgaaggcatttatgacactctaaag

SEQ ID NO: 2689 - DNA, 26 bp, Artificial Sequence
  Made in the lab
ttgaaggcatttatgacactctaaag

SEQ ID NO: 2690 - DNA, 27 bp, Artificial Sequence
  Made in the lab
attgaaggcatttatgacactctaaag

SEQ ID NO: 2691 - DNA, 28 bp, Artificial Sequence
  Made in the lab
cattgaaggcatttatgacactctaaag

SEQ ID NO: 2692 - DNA, 29 bp, Artificial Sequence
  Made in the lab
gcattgaaggcatttatgacactctaaag

SEQ ID NO: 2693 - DNA, 30 bp, Artificial Sequence
  Made in the lab
agcattgaaggcatttatgacactctaaag

SEQ ID NO: 2694 - DNA, 21 bp, Artificial Sequence
  Made in the lab
cacacatacgactttaagaag

SEQ ID NO: 2695 - DNA, 22 bp, Artificial Sequence
  Made in the lab
acacacatacgactttaagaag

SEQ ID NO: 2696 - DNA, 23 bp, Artificial Sequence
  Made in the lab
aacacacatacgactttaagaag

SEQ ID NO: 2697 - DNA, 24 bp, Artificial Sequence
  Made in the lab
gaacacacatacgactttaagaag

SEQ ID NO: 2698 - DNA, 25 bp, Artificial Sequence
  Made in the lab
agaacacacatacgactttaagaag

SEQ ID NO: 2699 - DNA, 26 bp, Artificial Sequence
  Made in the lab
cagaacacacatacgactttaagaag

SEQ ID NO: 2700 - DNA, 27 bp, Artificial Sequence
  Made in the lab
tcagaacacacatacgactttaagaag

SEQ ID NO: 2701 - DNA, 28 bp, Artificial Sequence
  Made in the lab
atcagaacacacatacgactttaagaag

SEQ ID NO: 2702 - DNA, 29 bp, Artificial Sequence
  Made in the lab
catcagaacacacatacgactttaagaag

SEQ ID NO: 2703 - DNA, 30 bp, Artificial Sequence
  Made in the lab
acatcagaacacacatacgactttaagaag

SEQ ID NO: 2704 - DNA, 21 bp, Artificial Sequence
  Made in the lab
accagattattgcatgcaatg

SEQ ID NO: 2705 - DNA, 22 bp, Artificial Sequence
  Made in the lab
aaccagattattgcatgcaatg

SEQ ID NO: 2706 - DNA, 23 bp, Artificial Sequence
  Made in the lab
aaaccagattattgcatgcaatg

SEQ ID NO: 2707 - DNA, 24 bp, Artificial Sequence
  Made in the lab
aaaaccagattattgcatgcaatg

SEQ ID NO: 2708 - DNA, 25 bp, Artificial Sequence
  Made in the lab
aaaaaccagattattgcatgcaatg

SEQ ID NO: 2709 - DNA, 26 bp, Artificial Sequence
  Made in the lab
gaaaaaccagattattgcatgcaatg

SEQ ID NO: 2710 - DNA, 27 bp, Artificial Sequence
  Made in the lab
tgaaaaaccagattattgcatgcaatg

SEQ ID NO: 2711 - DNA, 28 bp, Artificial Sequence
  Made in the lab
atgaaaaaccagattattgcatgcaatg

SEQ ID NO: 2712 - DNA, 29 bp, Artificial Sequence
  Made in the lab
gatgaaaaaccagattattgcatgcaatg

SEQ ID NO: 2713 - DNA, 30 bp, Artificial Sequence
  Made in the lab
agatgaaaaaccagattattgcatgcaatg

SEQ ID NO: 2714 - DNA, 21 bp, Artificial Sequence
  Made in the lab
gtactgataggacctttatct

SEQ ID NO: 2715 - DNA, 22 bp, Artificial Sequence
  Made in the lab
agtactgataggacctttatct

SEQ ID NO: 2716 - DNA, 23 bp, Artificial Sequence
  Made in the lab
aagtactgataggacctttatct

SEQ ID NO: 2717 - DNA, 24 bp, Artificial Sequence
  Made in the lab
gaagtactgataggacctttatct

SEQ ID NO: 2718 - DNA, 25 bp, Artificial Sequence
  Made in the lab
agaagtactgataggacctttatct

SEQ ID NO: 2719 - DNA, 26 bp, Artificial Sequence
  Made in the lab
gagaagtactgataggacctttatct

SEQ ID NO: 2720 - DNA, 27 bp, Artificial Sequence
  Made in the lab
tgagaagtactgataggacctttatct

SEQ ID NO: 2721 - DNA, 28 bp, Artificial Sequence
  Made in the lab
atgagaagtactgataggacctttatct

SEQ ID NO: 2722 - DNA, 29 bp, Artificial Sequence
  Made in the lab
catgagaagtactgataggacctttatct

SEQ ID NO: 2723 - DNA, 30 bp, Artificial Sequence
  Made in the lab
tcatgagaagtactgataggacctttatct

SEQ ID NO: 2724 - DNA, 21 bp, Artificial Sequence
  Made in the lab
tcttctttctgagaggtggtt

SEQ ID NO: 2725 - DNA, 22 bp, Artificial Sequence
  Made in the lab
atcttctttctgagaggtggtt

SEQ ID NO: 2726 - DNA, 23 bp, Artificial Sequence
  Made in the lab
aatcttctttctgagaggtggtt

SEQ ID NO: 2727 - DNA, 24 bp, Artificial Sequence
  Made in the lab
taatcttctttctgagaggtggtt

SEQ ID NO: 2728 - DNA, 25 bp, Artificial Sequence
  Made in the lab
ataatcttctttctgagaggtggtt

SEQ ID NO: 2729 - DNA, 26 bp, Artificial Sequence
  Made in the lab
tataatcttctttctgagaggtggtt

SEQ ID NO: 2730 - DNA, 27 bp, Artificial Sequence
  Made in the lab
atataatcttctttctgagaggtggtt

SEQ ID NO: 2731 - DNA, 28 bp, Artificial Sequence
  Made in the lab
catataatcttctttctgagaggtggtt

SEQ ID NO: 2732 - DNA, 29 bp, Artificial Sequence
  Made in the lab
acatataatcttctttctgagaggtggtt

SEQ ID NO: 2733 - DNA, 30 bp, Artificial Sequence
  Made in the lab
aacatataatcttctttctgagaggtggtt

SEQ ID NO: 2734 - DNA, 21 bp, Artificial Sequence
  Made in the lab
tgttactcctacagacctatg

SEQ ID NO: 2735 - DNA, 22 bp, Artificial Sequence
  Made in the lab
atgttactcctacagacctatg

SEQ ID NO: 2736 - DNA, 23 bp, Artificial Sequence
  Made in the lab
aatgttactcctacagacctatg

SEQ ID NO: 2737 - DNA, 24 bp, Artificial Sequence
  Made in the lab
gaatgttactcctacagacctatg

SEQ ID NO: 2738 - DNA, 25 bp, Artificial Sequence
  Made in the lab
ggaatgttactcctacagacctatg

SEQ ID NO: 2739 - DNA, 26 bp, Artificial Sequence
  Made in the lab
tggaatgttactcctacagacctatg

SEQ ID NO: 2740 - DNA, 27 bp, Artificial Sequence
  Made in the lab
gtggaatgttactcctacagacctatg

SEQ ID NO: 2741 - DNA, 28 bp, Artificial Sequence
  Made in the lab
tgtggaatgttactcctacagacctatg

SEQ ID NO: 2742 - DNA, 29 bp, Artificial Sequence
  Made in the lab
atgtggaatgttactcctacagacctatg

SEQ ID NO: 2743 - DNA, 30 bp, Artificial Sequence
  Made in the lab
tatgtggaatgttactcctacagacctatg

SEQ ID NO: 2744 - DNA, 21 bp, Artificial Sequence
  Made in the lab
ccttacaccagcaacatctat

SEQ ID NO: 2745 - DNA, 22 bp, Artificial Sequence
  Made in the lab
accttacaccagcaacatctat

SEQ ID NO: 2746 - DNA, 23 bp, Artificial Sequence
  Made in the lab
aaccttacaccagcaacatctat

SEQ ID NO: 2747 - DNA, 24 bp, Artificial Sequence
  Made in the lab
gaaccttacaccagcaacatctat

SEQ ID NO: 2748 - DNA, 25 bp, Artificial Sequence
  Made in the lab
tgaaccttacaccagcaacatctat

SEQ ID NO: 2749 - DNA, 26 bp, Artificial Sequence
  Made in the lab
ttgaaccttacaccagcaacatctat

SEQ ID NO: 2750 - DNA, 27 bp, Artificial Sequence
  Made in the lab
attgaaccttacaccagcaacatctat

SEQ ID NO: 2751 - DNA, 28 bp, Artificial Sequence
  Made in the lab
cattgaaccttacaccagcaacatctat

SEQ ID NO: 2752 - DNA, 29 bp, Artificial Sequence
  Made in the lab
ccattgaaccttacaccagcaacatctat

SEQ ID NO: 2753 - DNA, 30 bp, Artificial Sequence
  Made in the lab
tccattgaaccttacaccagcaacatctat

SEQ ID NO: 2754 - DNA, 21 bp, Artificial Sequence
  Made in the lab
catctatactcgcagagtctt

SEQ ID NO: 2755 - DNA, 22 bp, Artificial Sequence
  Made in the lab
acatctatactcgcagagtctt

SEQ ID NO: 2756 - DNA, 23 bp, Artificial Sequence
  Made in the lab
aacatctatactcgcagagtctt

SEQ ID NO: 2757 - DNA, 24 bp, Artificial Sequence
  Made in the lab
caacatctatactcgcagagtctt

SEQ ID NO: 2758 - DNA, 25 bp, Artificial Sequence
  Made in the lab
gcaacatctatactcgcagagtctt

SEQ ID NO: 2759 - DNA, 26 bp, Artificial Sequence
  Made in the lab
agcaacatctatactcgcagagtctt

SEQ ID NO: 2760 - DNA, 27 bp, Artificial Sequence
  Made in the lab
cagcaacatctatactcgcagagtctt

SEQ ID NO: 2761 - DNA, 28 bp, Artificial Sequence
  Made in the lab
ccagcaacatctatactcgcagagtctt

SEQ ID NO: 2762 - DNA, 29 bp, Artificial Sequence
  Made in the lab
accagcaacatctatactcgcagagtctt

SEQ ID NO: 2763 - DNA, 30 bp, Artificial Sequence
  Made in the lab
caccagcaacatctatactcgcagagtctt

SEQ ID NO: 2764 - DNA, 21 bp, Artificial Sequence
  Made in the lab
ctcatgagaagtactgatagg

SEQ ID NO: 2765 - DNA, 22 bp, Artificial Sequence
  Made in the lab
actcatgagaagtactgatagg

SEQ ID NO: 2766 - DNA, 23 bp, Artificial Sequence
  Made in the lab
aactcatgagaagtactgatagg

SEQ ID NO: 2767 - DNA, 24 bp, Artificial Sequence
  Made in the lab
taactcatgagaagtactgatagg

SEQ ID NO: 2768 - DNA, 25 bp, Artificial Sequence
  Made in the lab
ataactcatgagaagtactgatagg

SEQ ID NO: 2769 - DNA, 26 bp, Artificial Sequence
  Made in the lab
gataactcatgagaagtactgatagg

SEQ ID NO: 2770 - DNA, 27 bp, Artificial Sequence
  Made in the lab
tgataactcatgagaagtactgatagg

SEQ ID NO: 2771 - DNA, 28 bp, Artificial Sequence
  Made in the lab
gtgataactcatgagaagtactgatagg

SEQ ID NO: 2772 - DNA, 29 bp, Artificial Sequence
  Made in the lab
agtgataactcatgagaagtactgatagg

SEQ ID NO: 2773 - DNA, 30 bp, Artificial Sequence
  Made in the lab
gagtgataactcatgagaagtactgatagg

SEQ ID NO: 2774 - DNA, 21 bp, Artificial Sequence
  Made in the lab
acctatgagggctctccagtt

SEQ ID NO: 2775 - DNA, 22 bp, Artificial Sequence
  Made in the lab
aacctatgagggctctccagtt

SEQ ID NO: 2776 - DNA, 23 bp, Artificial Sequence
  Made in the lab
aaacctatgagggctctccagtt

SEQ ID NO: 2777 - DNA, 24 bp, Artificial Sequence
  Made in the lab
gaaacctatgagggctctccagtt

SEQ ID NO: 2778 - DNA, 25 bp, Artificial Sequence
  Made in the lab
cgaaacctatgagggctctccagtt

SEQ ID NO: 2779 - DNA, 26 bp, Artificial Sequence
  Made in the lab
acgaaacctatgagggctctccagtt

SEQ ID NO: 2780 - DNA, 27 bp, Artificial Sequence
  Made in the lab
tacgaaacctatgagggctctccagtt

SEQ ID NO: 2781 - DNA, 28 bp, Artificial Sequence
  Made in the lab
atacgaaacctatgagggctctccagtt

SEQ ID NO: 2782 - DNA, 29 bp, Artificial Sequence
  Made in the lab
catacgaaacctatgagggctctccagtt

SEQ ID NO: 2783 - DNA, 30 bp, Artificial Sequence
  Made in the lab
ccatacgaaacctatgagggctctccagtt

SEQ ID NO: 2784 - DNA, 21 bp, Artificial Sequence
  Made in the lab
cccttcccactctgtcacctt

SEQ ID NO: 2785 - DNA, 22 bp, Artificial Sequence
  Made in the lab
acccttcccactctgtcacctt

SEQ ID NO: 2786 - DNA, 23 bp, Artificial Sequence
  Made in the lab
aacccttcccactctgtcacctt

SEQ ID NO: 2787 - DNA, 24 bp, Artificial Sequence
  Made in the lab
taacccttcccactctgtcacctt

SEQ ID NO: 2788 - DNA, 25 bp, Artificial Sequence
  Made in the lab
ctaacccttcccactctgtcacctt

SEQ ID NO: 2789 - DNA, 26 bp, Artificial Sequence
  Made in the lab
cctaacccttcccactctgtcacctt

SEQ ID NO: 2790 - DNA, 27 bp, Artificial Sequence
  Made in the lab
acctaacccttcccactctgtcacctt

SEQ ID NO: 2791 - DNA, 28 bp, Artificial Sequence
  Made in the lab
aacctaacccttcccactctgtcacctt

SEQ ID NO: 2792 - DNA, 29 bp, Artificial Sequence
  Made in the lab
gaacctaacccttcccactctgtcacctt

SEQ ID NO: 2793 - DNA, 30 bp, Artificial Sequence
  Made in the lab
ggaacctaacccttcccactctgtcacctt

SEQ ID NO: 2794 - DNA, 21 bp, Artificial Sequence
  Made in the lab
gagcagcgtgccagagatctt

SEQ ID NO: 2795 - DNA, 22 bp, Artificial Sequence
  Made in the lab
agagcagcgtgccagagatctt

SEQ ID NO: 2796 - DNA, 23 bp, Artificial Sequence
  Made in the lab
aagagcagcgtgccagagatctt

SEQ ID NO: 2797 - DNA, 24 bp, Artificial Sequence
  Made in the lab
gaagagcagcgtgccagagatctt

SEQ ID NO: 2798 - DNA, 25 bp, Artificial Sequence
  Made in the lab
ggaagagcagcgtgccagagatctt

SEQ ID NO: 2799 - DNA, 26 bp, Artificial Sequence
  Made in the lab
aggaagagcagcgtgccagagatctt

SEQ ID NO: 2800 - DNA, 27 bp, Artificial Sequence
  Made in the lab
aaggaagagcagcgtgccagagatctt

SEQ ID NO: 2801 - DNA, 28 bp, Artificial Sequence
  Made in the lab
aaaggaagagcagcgtgccagagatctt

SEQ ID NO: 2802 - DNA, 29 bp, Artificial Sequence
  Made in the lab
gaaaggaagagcagcgtgccagagatctt

SEQ ID NO: 2803 - DNA, 30 bp, Artificial Sequence
  Made in the lab
ggaaaggaagagcagcgtgccagagatctt

SEQ ID NO: 2804 - DNA, 21 bp, Artificial Sequence
  Made in the lab
ggacaagaccagcggctaatc

SEQ ID NO: 2805 - DNA, 22 bp, Artificial Sequence
  Made in the lab
aggacaagaccagcggctaatc

SEQ ID NO: 2806 - DNA, 23 bp, Artificial Sequence
  Made in the lab
aaggacaagaccagcggctaatc

SEQ ID NO: 2807 - DNA, 24 bp, Artificial Sequence
  Made in the lab
taaggacaagaccagcggctaatc

SEQ ID NO: 2808 - DNA, 25 bp, Artificial Sequence
  Made in the lab
ttaaggacaagaccagcggctaatc

SEQ ID NO: 2809 - DNA, 26 bp, Artificial Sequence
  Made in the lab
tttaaggacaagaccagcggctaatc

SEQ ID NO: 2810 - DNA, 27 bp, Artificial Sequence
  Made in the lab
atttaaggacaagaccagcggctaatc

SEQ ID NO: 2811 - DNA, 28 bp, Artificial Sequence
  Made in the lab
tatttaaggacaagaccagcggctaatc

SEQ ID NO: 2812 - DNA, 29 bp, Artificial Sequence
  Made in the lab
ttatttaaggacaagaccagcggctaatc

SEQ ID NO: 2813 - DNA, 30 bp, Artificial Sequence
  Made in the lab
attatttaaggacaagaccagcggctaatc

SEQ ID NO: 2814 - DNA, 21 bp, Artificial Sequence
  Made in the lab
gaccagcggctaatccaatcc

SEQ ID NO: 2815 - DNA, 22 bp, Artificial Sequence
  Made in the lab
agaccagcggctaatccaatcc

SEQ ID NO: 2816 - DNA, 23 bp, Artificial Sequence
  Made in the lab
aagaccagcggctaatccaatcc

SEQ ID NO: 2817 - DNA, 24 bp, Artificial Sequence
  Made in the lab
caagaccagcggctaatccaatcc

SEQ ID NO: 2818 - DNA, 25 bp, Artificial Sequence
  Made in the lab
acaagaccagcggctaatccaatcc

SEQ ID NO: 2819 - DNA, 26 bp, Artificial Sequence
  Made in the lab
gacaagaccagcggctaatccaatcc

SEQ ID NO: 2820 - DNA, 27 bp, Artificial Sequence
  Made in the lab
ggacaagaccagcggctaatccaatcc

SEQ ID NO: 2821 - DNA, 28 bp, Artificial Sequence
  Made in the lab
aggacaagaccagcggctaatccaatcc

SEQ ID NO: 2822 - DNA, 29 bp, Artificial Sequence
  Made in the lab
aaggacaagaccagcggctaatccaatcc

SEQ ID NO: 2823 - DNA, 30 bp, Artificial Sequence
  Made in the lab
taaggacaagaccagcggctaatccaatcc

SEQ ID NO: 2824 - DNA, 21 bp, Artificial Sequence
  Made in the lab
gcaaaggaattcttcagtatg

SEQ ID NO: 2825 - DNA, 22 bp, Artificial Sequence
  Made in the lab
agcaaaggaattcttcagtatg

SEQ ID NO: 2826 - DNA, 23 bp, Artificial Sequence
  Made in the lab
tagcaaaggaattcttcagtatg

SEQ ID NO: 2827 - DNA, 24 bp, Artificial Sequence
  Made in the lab
ttagcaaaggaattcttcagtatg

SEQ ID NO: 2828 - DNA, 25 bp, Artificial Sequence
  Made in the lab
gttagcaaaggaattcttcagtatg

SEQ ID NO: 2829 - DNA, 26 bp, Artificial Sequence
  Made in the lab
agttagcaaaggaattcttcagtatg

SEQ ID NO: 2830 - DNA, 27 bp, Artificial Sequence
  Made in the lab
cagttagcaaaggaattcttcagtatg

SEQ ID NO: 2831 - DNA, 28 bp, Artificial Sequence
  Made in the lab
ccagttagcaaaggaattcttcagtatg

SEQ ID NO: 2832 - DNA, 29 bp, Artificial Sequence
  Made in the lab
tccagttagcaaaggaattcttcagtatg

SEQ ID NO: 2833 - DNA, 30 bp, Artificial Sequence
  Made in the lab
ctccagttagcaaaggaattcttcagtatg

SEQ ID NO: 2834 - DNA, 21 bp, Artificial Sequence
  Made in the lab
gggatccacaaatgctaaaga

SEQ ID NO: 2835 - DNA, 22 bp, Artificial Sequence
  Made in the lab
agggatccacaaatgctaaaga

SEQ ID NO: 2836 - DNA, 23 bp, Artificial Sequence
  Made in the lab
aagggatccacaaatgctaaaga

SEQ ID NO: 2837 - DNA, 24 bp, Artificial Sequence
  Made in the lab
caagggatccacaaatgctaaaga

SEQ ID NO: 2838 - DNA, 25 bp, Artificial Sequence
  Made in the lab
tcaagggatccacaaatgctaaaga

SEQ ID NO: 2839 - DNA, 26 bp, Artificial Sequence
  Made in the lab
atcaagggatccacaaatgctaaaga

SEQ ID NO: 2840 - DNA, 27 bp, Artificial Sequence
  Made in the lab
tatcaagggatccacaaatgctaaaga

SEQ ID NO: 2841 - DNA, 28 bp, Artificial Sequence
  Made in the lab
ttatcaagggatccacaaatgctaaaga

SEQ ID NO: 2842 - DNA, 29 bp, Artificial Sequence
  Made in the lab
tttatcaagggatccacaaatgctaaaga

SEQ ID NO: 2843 - DNA, 30 bp, Artificial Sequence
  Made in the lab
gtttatcaagggatccacaaatgctaaaga

SEQ ID NO: 2844 - DNA, 21 bp, Artificial Sequence
  Made in the lab
caaagtgaggagaatgaaatg

SEQ ID NO: 2845 - DNA, 22 bp, Artificial Sequence
  Made in the lab
acaaagtgaggagaatgaaatg

SEQ ID NO: 2846 - DNA, 23 bp, Artificial Sequence
  Made in the lab
aacaaagtgaggagaatgaaatg

SEQ ID NO: 2847 - DNA, 24 bp, Artificial Sequence
  Made in the lab
gaacaaagtgaggagaatgaaatg

SEQ ID NO: 2848 - DNA, 25 bp, Artificial Sequence
  Made in the lab
tgaacaaagtgaggagaatgaaatg

SEQ ID NO: 2849 - DNA, 26 bp, Artificial Sequence
  Made in the lab
atgaacaaagtgaggagaatgaaatg

SEQ ID NO: 2850 - DNA, 27 bp, Artificial Sequence
  Made in the lab
tatgaacaaagtgaggagaatgaaatg

SEQ ID NO: 2851 - DNA, 28 bp, Artificial Sequence
  Made in the lab
ttatgaacaaagtgaggagaatgaaatg

SEQ ID NO: 2852 - DNA, 29 bp, Artificial Sequence
  Made in the lab
gttatgaacaaagtgaggagaatgaaatg

SEQ ID NO: 2853 - DNA, 30 bp, Artificial Sequence
  Made in the lab
ggttatgaacaaagtgaggagaatgaaatg

SEQ ID NO: 2854 - DNA, 21 bp, Artificial Sequence
  Made in the lab
tccgcatccaactattaaaat

SEQ ID NO: 2855 - DNA, 22 bp, Artificial Sequence
  Made in the lab
atccgcatccaactattaaaat

SEQ ID NO: 2856 - DNA, 23 bp, Artificial Sequence
  Made in the lab
aatccgcatccaactattaaaat

SEQ ID NO: 2857 - DNA, 24 bp, Artificial Sequence
  Made in the lab
caatccgcatccaactattaaaat

SEQ ID NO: 2858 - DNA, 25 bp, Artificial Sequence
  Made in the lab
acaatccgcatccaactattaaaat

SEQ ID NO: 2859 - DNA, 26 bp, Artificial Sequence
  Made in the lab
tacaatccgcatccaactattaaaat

SEQ ID NO: 2860 - DNA, 27 bp, Artificial Sequence
  Made in the lab
gtacaatccgcatccaactattaaaat

SEQ ID NO: 2861 - DNA, 28 bp, Artificial Sequence
  Made in the lab
ggtacaatccgcatccaactattaaaat

SEQ ID NO: 2862 - DNA, 29 bp, Artificial Sequence
  Made in the lab
gggtacaatccgcatccaactattaaaat

SEQ ID NO: 2863 - DNA, 30 bp, Artificial Sequence
  Made in the lab
agggtacaatccgcatccaactattaaaat

SEQ ID NO: 2864 - DNA, 21 bp, Artificial Sequence
  Made in the lab
agagtgattgacaccatcaaa

SEQ ID NO: 2865 - DNA, 22 bp, Artificial Sequence
  Made in the lab
aagagtgattgacaccatcaaa

SEQ ID NO: 2866 - DNA, 23 bp, Artificial Sequence
  Made in the lab
aaagagtgattgacaccatcaaa

SEQ ID NO: 2867 - DNA, 24 bp, Artificial Sequence
  Made in the lab
caaagagtgattgacaccatcaaa

SEQ ID NO: 2868 - DNA, 25 bp, Artificial Sequence
  Made in the lab
gcaaagagtgattgacaccatcaaa

SEQ ID NO: 2869 - DNA, 26 bp, Artificial Sequence
  Made in the lab
tgcaaagagtgattgacaccatcaaa

SEQ ID NO: 2870 - DNA, 27 bp, Artificial Sequence
  Made in the lab
ctgcaaagagtgattgacaccatcaaa

SEQ ID NO: 2871 - DNA, 28 bp, Artificial Sequence
  Made in the lab
actgcaaagagtgattgacaccatcaaa

SEQ ID NO: 2872 - DNA, 29 bp, Artificial Sequence
  Made in the lab
aactgcaaagagtgattgacaccatcaaa

SEQ ID NO: 2873 - DNA, 30 bp, Artificial Sequence
  Made in the lab
caactgcaaagagtgattgacaccatcaaa

SEQ ID NO: 2874 - DNA, 21 bp, Artificial Sequence
  Made in the lab
agctcaggattcttcgaaaag

SEQ ID NO: 2875 - DNA, 22 bp, Artificial Sequence
  Made in the lab
aagctcaggattcttcgaaaag

SEQ ID NO: 2876 - DNA, 23 bp, Artificial Sequence
  Made in the lab
aaagctcaggattcttcgaaaag

SEQ ID NO: 2877 - DNA, 24 bp, Artificial Sequence
  Made in the lab
caaagctcaggattcttcgaaaag

SEQ ID NO: 2878 - DNA, 25 bp, Artificial Sequence
  Made in the lab
ccaaagctcaggattcttcgaaaag

SEQ ID NO: 2879 - DNA, 26 bp, Artificial Sequence
  Made in the lab
cccaaagctcaggattcttcgaaaag

SEQ ID NO: 2880 - DNA, 27 bp, Artificial Sequence
  Made in the lab
tcccaaagctcaggattcttcgaaaag

SEQ ID NO: 2881 - DNA, 28 bp, Artificial Sequence
  Made in the lab
ttcccaaagctcaggattcttcgaaaag

SEQ ID NO: 2882 - DNA, 29 bp, Artificial Sequence
  Made in the lab
tttcccaaagctcaggattcttcgaaaag

SEQ ID NO: 2883 - DNA, 30 bp, Artificial Sequence
  Made in the lab
ctttcccaaagctcaggattcttcgaaaag

SEQ ID NO: 2884 - DNA, 21 bp, Artificial Sequence
  Made in the lab
gggtacaatccgcatccaact

SEQ ID NO: 2885 - DNA, 22 bp, Artificial Sequence
  Made in the lab
agggtacaatccgcatccaact

SEQ ID NO: 2886 - DNA, 23 bp, Artificial Sequence
  Made in the lab
aagggtacaatccgcatccaact

SEQ ID NO: 2887 - DNA, 24 bp, Artificial Sequence
  Made in the lab
gaagggtacaatccgcatccaact

SEQ ID NO: 2888 - DNA, 25 bp, Artificial Sequence
  Made in the lab
tgaagggtacaatccgcatccaact

SEQ ID NO: 2889 - DNA, 26 bp, Artificial Sequence
  Made in the lab
ttgaagggtacaatccgcatccaact

SEQ ID NO: 2890 - DNA, 27 bp, Artificial Sequence
  Made in the lab
attgaagggtacaatccgcatccaact

SEQ ID NO: 2891 - DNA, 28 bp, Artificial Sequence
  Made in the lab
gattgaagggtacaatccgcatccaact

SEQ ID NO: 2892 - DNA, 29 bp, Artificial Sequence
  Made in the lab
agattgaagggtacaatccgcatccaact

SEQ ID NO: 2893 - DNA, 30 bp, Artificial Sequence
  Made in the lab
cagattgaagggtacaatccgcatccaact

SEQ ID NO: 2894 - DNA, 21 bp, Artificial Sequence
  Made in the lab
aaaggaactaggtcaaaaatc

SEQ ID NO: 2895 - DNA, 22 bp, Artificial Sequence
  Made in the lab
aaaaggaactaggtcaaaaatc

SEQ ID NO: 2896 - DNA, 23 bp, Artificial Sequence
  Made in the lab
aaaaaggaactaggtcaaaaatc

SEQ ID NO: 2897 - DNA, 24 bp, Artificial Sequence
  Made in the lab
gaaaaaggaactaggtcaaaaatc

SEQ ID NO: 2898 - DNA, 25 bp, Artificial Sequence
  Made in the lab
agaaaaaggaactaggtcaaaaatc

SEQ ID NO: 2899 - DNA, 26 bp, Artificial Sequence
  Made in the lab
aagaaaaaggaactaggtcaaaaatc

SEQ ID NO: 2900 - DNA, 27 bp, Artificial Sequence
  Made in the lab
aaagaaaaaggaactaggtcaaaaatc

SEQ ID NO: 2901 - DNA, 28 bp, Artificial Sequence
  Made in the lab
aaaagaaaaaggaactaggtcaaaaatc

SEQ ID NO: 2902 - DNA, 29 bp, Artificial Sequence
  Made in the lab
taaaagaaaaaggaactaggtcaaaaatc

SEQ ID NO: 2903 - DNA, 30 bp, Artificial Sequence
  Made in the lab
ctaaaagaaaaaggaactaggtcaaaaatc

SEQ ID NO: 2904 - DNA, 21 bp, Artificial Sequence
  Made in the lab
taaaaggctttgagttaactc

SEQ ID NO: 2905 - DNA, 22 bp, Artificial Sequence
  Made in the lab
ataaaaggctttgagttaactc

SEQ ID NO: 2906 - DNA, 23 bp, Artificial Sequence
  Made in the lab
aataaaaggctttgagttaactc

SEQ ID NO: 2907 - DNA, 24 bp, Artificial Sequence
  Made in the lab
taataaaaggctttgagttaactc

SEQ ID NO: 2908 - DNA, 25 bp, Artificial Sequence
  Made in the lab
ataataaaaggctttgagttaactc

SEQ ID NO: 2909 - DNA, 26 bp, Artificial Sequence
  Made in the lab
cataataaaaggctttgagttaactc

SEQ ID NO: 2910 - DNA, 27 bp, Artificial Sequence
  Made in the lab
ccataataaaaggctttgagttaactc

SEQ ID NO: 2911 - DNA, 28 bp, Artificial Sequence
  Made in the lab
tccataataaaaggctttgagttaactc

SEQ ID NO: 2912 - DNA, 29 bp, Artificial Sequence
  Made in the lab
ttccataataaaaggctttgagttaactc

SEQ ID NO: 2913 - DNA, 30 bp, Artificial Sequence
  Made in the lab
tttccataataaaaggctttgagttaactc

SEQ ID NO: 2914 - DNA, 21 bp, Artificial Sequence
  Made in the lab
acatgtatgtgcatttcaatc

SEQ ID NO: 2915 - DNA, 22 bp, Artificial Sequence
  Made in the lab
aacatgtatgtgcatttcaatc

SEQ ID NO: 2916 - DNA, 23 bp, Artificial Sequence
  Made in the lab
aaacatgtatgtgcatttcaatc

SEQ ID NO: 2917 - DNA, 24 bp, Artificial Sequence
  Made in the lab
aaaacatgtatgtgcatttcaatc

SEQ ID NO: 2918 - DNA, 25 bp, Artificial Sequence
  Made in the lab
aaaaacatgtatgtgcatttcaatc

SEQ ID NO: 2919 - DNA, 26 bp, Artificial Sequence
  Made in the lab
caaaaacatgtatgtgcatttcaatc

SEQ ID NO: 2920 - DNA, 27 bp, Artificial Sequence
  Made in the lab
gcaaaaacatgtatgtgcatttcaatc

SEQ ID NO: 2921 - DNA, 28 bp, Artificial Sequence
  Made in the lab
agcaaaaacatgtatgtgcatttcaatc

SEQ ID NO: 2922 - DNA, 29 bp, Artificial Sequence
  Made in the lab
tagcaaaaacatgtatgtgcatttcaatc

SEQ ID NO: 2923 - DNA, 30 bp, Artificial Sequence
  Made in the lab
ttagcaaaaacatgtatgtgcatttcaatc

SEQ ID NO: 2924 - DNA, 21 bp, Artificial Sequence
  Made in the lab
atgtaactgtgccagttcttt

SEQ ID NO: 2925 - DNA, 22 bp, Artificial Sequence
  Made in the lab
aatgtaactgtgccagttcttt

SEQ ID NO: 2926 - DNA, 23 bp, Artificial Sequence
  Made in the lab
aaatgtaactgtgccagttcttt

SEQ ID NO: 2927 - DNA, 24 bp, Artificial Sequence
  Made in the lab
caaatgtaactgtgccagttcttt

SEQ ID NO: 2928 - DNA, 25 bp, Artificial Sequence
  Made in the lab
gcaaatgtaactgtgccagttcttt

SEQ ID NO: 2929 - DNA, 26 bp, Artificial Sequence
  Made in the lab
ggcaaatgtaactgtgccagttcttt

SEQ ID NO: 2930 - DNA, 27 bp, Artificial Sequence
  Made in the lab
tggcaaatgtaactgtgccagttcttt

SEQ ID NO: 2931 - DNA, 28 bp, Artificial Sequence
  Made in the lab
ctggcaaatgtaactgtgccagttcttt

SEQ ID NO: 2932 - DNA, 29 bp, Artificial Sequence
  Made in the lab
actggcaaatgtaactgtgccagttcttt

SEQ ID NO: 2933 - DNA, 30 bp, Artificial Sequence
  Made in the lab
cactggcaaatgtaactgtgccagttcttt

SEQ ID NO: 2934 - DNA, 21 bp, Artificial Sequence
  Made in the lab
gctcaggattcttcgaaaagt

SEQ ID NO: 2935 - DNA, 22 bp, Artificial Sequence
  Made in the lab
agctcaggattcttcgaaaagt

SEQ ID NO: 2936 - DNA, 23 bp, Artificial Sequence
  Made in the lab
aagctcaggattcttcgaaaagt

SEQ ID NO: 2937 - DNA, 24 bp, Artificial Sequence
  Made in the lab
aaagctcaggattcttcgaaaagt

SEQ ID NO: 2938 - DNA, 25 bp, Artificial Sequence
  Made in the lab
caaagctcaggattcttcgaaaagt

SEQ ID NO: 2939 - DNA, 26 bp, Artificial Sequence
  Made in the lab
ccaaagctcaggattcttcgaaaagt

SEQ ID NO: 2940 - DNA, 27 bp, Artificial Sequence
  Made in the lab
cccaaagctcaggattcttcgaaaagt

SEQ ID NO: 2941 - DNA, 28 bp, Artificial Sequence
  Made in the lab
tcccaaagctcaggattcttcgaaaagt

SEQ ID NO: 2942 - DNA, 29 bp, Artificial Sequence
  Made in the lab
ttcccaaagctcaggattcttcgaaaagt

SEQ ID NO: 2943 - DNA, 30 bp, Artificial Sequence
  Made in the lab
tttcccaaagctcaggattcttcgaaaagt

SEQ ID NO: 2944 - DNA, 21 bp, Artificial Sequence
  Made in the lab
aatctgggatgccaatggatc

SEQ ID NO: 2945 - DNA, 22 bp, Artificial Sequence
  Made in the lab
aaatctgggatgccaatggatc

SEQ ID NO: 2946 - DNA, 23 bp, Artificial Sequence
  Made in the lab
aaaatctgggatgccaatggatc

SEQ ID NO: 2947 - DNA, 24 bp, Artificial Sequence
  Made in the lab
gaaaatctgggatgccaatggatc

SEQ ID NO: 2948 - DNA, 25 bp, Artificial Sequence
  Made in the lab
tgaaaatctgggatgccaatggatc

SEQ ID NO: 2949 - DNA, 26 bp, Artificial Sequence
  Made in the lab
gtgaaaatctgggatgccaatggatc

SEQ ID NO: 2950 - DNA, 27 bp, Artificial Sequence
  Made in the lab
agtgaaaatctgggatgccaatggatc

SEQ ID NO: 2951 - DNA, 28 bp, Artificial Sequence
  Made in the lab
gagtgaaaatctgggatgccaatggatc

SEQ ID NO: 2952 - DNA, 29 bp, Artificial Sequence
  Made in the lab
ggagtgaaaatctgggatgccaatggatc

SEQ ID NO: 2953 - DNA, 30 bp, Artificial Sequence
  Made in the lab
gggagtgaaaatctgggatgccaatggatc

SEQ ID NO: 2954 - DNA, 21 bp, Artificial Sequence
  Made in the lab
ctgcaaagagtgattgacacc

SEQ ID NO: 2955 - DNA, 22 bp, Artificial Sequence
  Made in the lab
actgcaaagagtgattgacacc

SEQ ID NO: 2956 - DNA, 23 bp, Artificial Sequence
  Made in the lab
aactgcaaagagtgattgacacc

SEQ ID NO: 2957 - DNA, 24 bp, Artificial Sequence
  Made in the lab
caactgcaaagagtgattgacacc

SEQ ID NO: 2958 - DNA, 25 bp, Artificial Sequence
  Made in the lab
ccaactgcaaagagtgattgacacc

SEQ ID NO: 2959 - DNA, 26 bp, Artificial Sequence
  Made in the lab
accaactgcaaagagtgattgacacc

SEQ ID NO: 2960 - DNA, 27 bp, Artificial Sequence
  Made in the lab
gaccaactgcaaagagtgattgacacc

SEQ ID NO: 2961 - DNA, 28 bp, Artificial Sequence
  Made in the lab
tgaccaactgcaaagagtgattgacacc

SEQ ID NO: 2962 - DNA, 29 bp, Artificial Sequence
  Made in the lab
ttgaccaactgcaaagagtgattgacacc

SEQ ID NO: 2963 - DNA, 30 bp, Artificial Sequence
  Made in the lab
gttgaccaactgcaaagagtgattgacacc

SEQ ID NO: 2964 - DNA, 21 bp, Artificial Sequence
  Made in the lab
gctattccctcaaatctgagg

SEQ ID NO: 2965 - DNA, 22 bp, Artificial Sequence
  Made in the lab
agctattccctcaaatctgagg

SEQ ID NO: 2966 - DNA, 23 bp, Artificial Sequence
  Made in the lab
aagctattccctcaaatctgagg

SEQ ID NO: 2967 - DNA, 24 bp, Artificial Sequence
  Made in the lab
caagctattccctcaaatctgagg

SEQ ID NO: 2968 - DNA, 25 bp, Artificial Sequence
  Made in the lab
acaagctattccctcaaatctgagg

SEQ ID NO: 2969 - DNA, 26 bp, Artificial Sequence
  Made in the lab
cacaagctattccctcaaatctgagg

SEQ ID NO: 2970 - DNA, 27 bp, Artificial Sequence
  Made in the lab
tcacaagctattccctcaaatctgagg

SEQ ID NO: 2971 - DNA, 28 bp, Artificial Sequence
  Made in the lab
ttcacaagctattccctcaaatctgagg

SEQ ID NO: 2972 - DNA, 29 bp, Artificial Sequence
  Made in the lab
tttcacaagctattccctcaaatctgagg

SEQ ID NO: 2973 - DNA, 30 bp, Artificial Sequence
  Made in the lab
atttcacaagctattccctcaaatctgagg

SEQ ID NO: 2974 - DNA, 21 bp, Artificial Sequence
  Made in the lab
ggatgttgccactggcaaatg

SEQ ID NO: 2975 - DNA, 22 bp, Artificial Sequence
  Made in the lab
aggatgttgccactggcaaatg

SEQ ID NO: 2976 - DNA, 23 bp, Artificial Sequence
  Made in the lab
aaggatgttgccactggcaaatg

SEQ ID NO: 2977 - DNA, 24 bp, Artificial Sequence
  Made in the lab
taaggatgttgccactggcaaatg

SEQ ID NO: 2978 - DNA, 25 bp, Artificial Sequence
  Made in the lab
ttaaggatgttgccactggcaaatg

SEQ ID NO: 2979 - DNA, 26 bp, Artificial Sequence
  Made in the lab
tttaaggatgttgccactggcaaatg

SEQ ID NO: 2980 - DNA, 27 bp, Artificial Sequence
  Made in the lab
ttttaaggatgttgccactggcaaatg

SEQ ID NO: 2981 - DNA, 28 bp, Artificial Sequence
  Made in the lab
tttttaaggatgttgccactggcaaatg

SEQ ID NO: 2982 - DNA, 29 bp, Artificial Sequence
  Made in the lab
atttttaaggatgttgccactggcaaatg

SEQ ID NO: 2983 - DNA, 30 bp, Artificial Sequence
  Made in the lab
aatttttaaggatgttgccactggcaaatg

SEQ ID NO: 2984 - DNA, 21 bp, Artificial Sequence
  Made in the lab
cccagacctttcccaaagctc

SEQ ID NO: 2985 - DNA, 22 bp, Artificial Sequence
  Made in the lab
acccagacctttcccaaagctc

SEQ ID NO: 2986 - DNA, 23 bp, Artificial Sequence
  Made in the lab
aacccagacctttcccaaagctc

SEQ ID NO: 2987 - DNA, 24 bp, Artificial Sequence
  Made in the lab
gaacccagacctttcccaaagctc

SEQ ID NO: 2988 - DNA, 25 bp, Artificial Sequence
  Made in the lab
agaacccagacctttcccaaagctc

SEQ ID NO: 2989 - DNA, 26 bp, Artificial Sequence
  Made in the lab
gagaacccagacctttcccaaagctc

SEQ ID NO: 2990 - DNA, 27 bp, Artificial Sequence
  Made in the lab
cgagaacccagacctttcccaaagctc

SEQ ID NO: 2991 - DNA, 28 bp, Artificial Sequence
  Made in the lab
gcgagaacccagacctttcccaaagctc

SEQ ID NO: 2992 - DNA, 29 bp, Artificial Sequence
  Made in the lab
agcgagaacccagacctttcccaaagctc

SEQ ID NO: 2993 - DNA, 30 bp, Artificial Sequence
  Made in the lab
cagcgagaacccagacctttcccaaagctc

SEQ ID NO: 2994 - DNA, 21 bp, Artificial Sequence
  Made in the lab
caatccgcatccaactattaa

SEQ ID NO: 2995 - DNA, 22 bp, Artificial Sequence
  Made in the lab
acaatccgcatccaactattaa

SEQ ID NO: 2996 - DNA, 23 bp, Artificial Sequence
  Made in the lab
tacaatccgcatccaactattaa

SEQ ID NO: 2997 - DNA, 24 bp, Artificial Sequence
  Made in the lab
gtacaatccgcatccaactattaa

SEQ ID NO: 2998 - DNA, 25 bp, Artificial Sequence
  Made in the lab
ggtacaatccgcatccaactattaa

SEQ ID NO: 2999 - DNA, 26 bp, Artificial Sequence
  Made in the lab
gggtacaatccgcatccaactattaa

SEQ ID NO: 3000 - DNA, 27 bp, Artificial Sequence
  Made in the lab
agggtacaatccgcatccaactattaa

SEQ ID NO: 3001 - DNA, 28 bp, Artificial Sequence
  Made in the lab
aagggtacaatccgcatccaactattaa

SEQ ID NO: 3002 - DNA, 29 bp, Artificial Sequence
  Made in the lab
gaagggtacaatccgcatccaactattaa

SEQ ID NO: 3003 - DNA, 30 bp, Artificial Sequence
  Made in the lab
tgaagggtacaatccgcatccaactattaa

SEQ ID NO: 3004 - DNA, 21 bp, Artificial Sequence
  Made in the lab
ccaactgcaaagagtgattga

SEQ ID NO: 3005 - DNA, 22 bp, Artificial Sequence
  Made in the lab
accaactgcaaagagtgattga

SEQ ID NO: 3006 - DNA, 23 bp, Artificial Sequence
  Made in the lab
gaccaactgcaaagagtgattga

SEQ ID NO: 3007 - DNA, 24 bp, Artificial Sequence
  Made in the lab
tgaccaactgcaaagagtgattga

SEQ ID NO: 3008 - DNA, 25 bp, Artificial Sequence
  Made in the lab
ttgaccaactgcaaagagtgattga

SEQ ID NO: 3009 - DNA, 26 bp, Artificial Sequence
  Made in the lab
gttgaccaactgcaaagagtgattga

SEQ ID NO: 3010 - DNA, 27 bp, Artificial Sequence
  Made in the lab
agttgaccaactgcaaagagtgattga

SEQ ID NO: 3011 - DNA, 28 bp, Artificial Sequence
  Made in the lab
gagttgaccaactgcaaagagtgattga

SEQ ID NO: 3012 - DNA, 29 bp, Artificial Sequence
  Made in the lab
ggagttgaccaactgcaaagagtgattga

SEQ ID NO: 3013 - DNA, 30 bp, Artificial Sequence
  Made in the lab
gggagttgaccaactgcaaagagtgattga

SEQ ID NO: 3014 - DNA, 21 bp, Artificial Sequence
  Made in the lab
gtgaggagaatgaaatgtatg

SEQ ID NO: 3015 - DNA, 22 bp, Artificial Sequence
  Made in the lab
agtgaggagaatgaaatgtatg

SEQ ID NO: 3016 - DNA, 23 bp, Artificial Sequence
  Made in the lab
aagtgaggagaatgaaatgtatg

SEQ ID NO: 3017 - DNA, 24 bp, Artificial Sequence
  Made in the lab
aaagtgaggagaatgaaatgtatg

SEQ ID NO: 3018 - DNA, 25 bp, Artificial Sequence
  Made in the lab
caaagtgaggagaatgaaatgtatg

SEQ ID NO: 3019 - DNA, 26 bp, Artificial Sequence
  Made in the lab
acaaagtgaggagaatgaaatgtatg

SEQ ID NO: 3020 - DNA, 27 bp, Artificial Sequence
  Made in the lab
aacaaagtgaggagaatgaaatgtatg

SEQ ID NO: 3021 - DNA, 28 bp, Artificial Sequence
  Made in the lab
gaacaaagtgaggagaatgaaatgtatg

SEQ ID NO: 3022 - DNA, 29 bp, Artificial Sequence
  Made in the lab
tgaacaaagtgaggagaatgaaatgtatg

SEQ ID NO: 3023 - DNA, 30 bp, Artificial Sequence
  Made in the lab
atgaacaaagtgaggagaatgaaatgtatg

SEQ ID NO: 3024 - DNA, 21 bp, Artificial Sequence
  Made in the lab
gctgagatggaagaattaatt

SEQ ID NO: 3025 - DNA, 22 bp, Artificial Sequence
  Made in the lab
agctgagatggaagaattaatt

SEQ ID NO: 3026 - DNA, 23 bp, Artificial Sequence
  Made in the lab
aagctgagatggaagaattaatt

SEQ ID NO: 3027 - DNA, 24 bp, Artificial Sequence
  Made in the lab
gaagctgagatggaagaattaatt

SEQ ID NO: 3028 - DNA, 25 bp, Artificial Sequence
  Made in the lab
ggaagctgagatggaagaattaatt

SEQ ID NO: 3029 - DNA, 26 bp, Artificial Sequence
  Made in the lab
aggaagctgagatggaagaattaatt

SEQ ID NO: 3030 - DNA, 27 bp, Artificial Sequence
  Made in the lab
caggaagctgagatggaagaattaatt

SEQ ID NO: 3031 - DNA, 28 bp, Artificial Sequence
  Made in the lab
tcaggaagctgagatggaagaattaatt

SEQ ID NO: 3032 - DNA, 29 bp, Artificial Sequence
  Made in the lab
gtcaggaagctgagatggaagaattaatt

SEQ ID NO: 3033 - DNA, 30 bp, Artificial Sequence
  Made in the lab
agtcaggaagctgagatggaagaattaatt

SEQ ID NO: 3034 - DNA, 21 bp, Artificial Sequence
  Made in the lab
tggaaccatgccttcataatt

SEQ ID NO: 3035 - DNA, 22 bp, Artificial Sequence
  Made in the lab
atggaaccatgccttcataatt

SEQ ID NO: 3036 - DNA, 23 bp, Artificial Sequence
  Made in the lab
aatggaaccatgccttcataatt

SEQ ID NO: 3037 - DNA, 24 bp, Artificial Sequence
  Made in the lab
caatggaaccatgccttcataatt

SEQ ID NO: 3038 - DNA, 25 bp, Artificial Sequence
  Made in the lab
acaatggaaccatgccttcataatt

SEQ ID NO: 3039 - DNA, 26 bp, Artificial Sequence
  Made in the lab
aacaatggaaccatgccttcataatt

SEQ ID NO: 3040 - DNA, 27 bp, Artificial Sequence
  Made in the lab
aaacaatggaaccatgccttcataatt

SEQ ID NO: 3041 - DNA, 28 bp, Artificial Sequence
  Made in the lab
aaaacaatggaaccatgccttcataatt

SEQ ID NO: 3042 - DNA, 29 bp, Artificial Sequence
  Made in the lab
gaaaacaatggaaccatgccttcataatt

SEQ ID NO: 3043 - DNA, 30 bp, Artificial Sequence
  Made in the lab
tgaaaacaatggaaccatgccttcataatt

SEQ ID NO: 3044 - DNA, 21 bp, Artificial Sequence
  Made in the lab
gctccatactgctgagataca

SEQ ID NO: 3045 - DNA, 22 bp, Artificial Sequence
  Made in the lab
agctccatactgctgagataca

SEQ ID NO: 3046 - DNA, 23 bp, Artificial Sequence
  Made in the lab
aagctccatactgctgagataca

SEQ ID NO: 3047 - DNA, 24 bp, Artificial Sequence
  Made in the lab
caagctccatactgctgagataca

SEQ ID NO: 3048 - DNA, 25 bp, Artificial Sequence
  Made in the lab
acaagctccatactgctgagataca

SEQ ID NO: 3049 - DNA, 26 bp, Artificial Sequence
  Made in the lab
aacaagctccatactgctgagataca

SEQ ID NO: 3050 - DNA, 27 bp, Artificial Sequence
  Made in the lab
taacaagctccatactgctgagataca

SEQ ID NO: 3051 - DNA, 28 bp, Artificial Sequence
  Made in the lab
ataacaagctccatactgctgagataca

SEQ ID NO: 3052 - DNA, 29 bp, Artificial Sequence
  Made in the lab
gataacaagctccatactgctgagataca

SEQ ID NO: 3053 - DNA, 30 bp, Artificial Sequence
  Made in the lab
tgataacaagctccatactgctgagataca

SEQ ID NO: 3054 - DNA, 21 bp, Artificial Sequence
  Made in the lab
ggccacacatggtttatttga

SEQ ID NO: 3055 - DNA, 22 bp, Artificial Sequence
  Made in the lab
aggccacacatggtttatttga

SEQ ID NO: 3056 - DNA, 23 bp, Artificial Sequence
  Made in the lab
aaggccacacatggtttatttga

SEQ ID NO: 3057 - DNA, 24 bp, Artificial Sequence
  Made in the lab
taaggccacacatggtttatttga

SEQ ID NO: 3058 - DNA, 25 bp, Artificial Sequence
  Made in the lab
ataaggccacacatggtttatttga

SEQ ID NO: 3059 - DNA, 26 bp, Artificial Sequence
  Made in the lab
tataaggccacacatggtttatttga

SEQ ID NO: 3060 - DNA, 27 bp, Artificial Sequence
  Made in the lab
gtataaggccacacatggtttatttga

SEQ ID NO: 3061 - DNA, 28 bp, Artificial Sequence
  Made in the lab
agtataaggccacacatggtttatttga

SEQ ID NO: 3062 - DNA, 29 bp, Artificial Sequence
  Made in the lab
aagtataaggccacacatggtttatttga

SEQ ID NO: 3063 - DNA, 30 bp, Artificial Sequence
  Made in the lab
aaagtataaggccacacatggtttatttga

SEQ ID NO: 3064 - DNA, 21 bp, Artificial Sequence
  Made in the lab
agggttggttaggcaatcatt

SEQ ID NO: 3065 - DNA, 22 bp, Artificial Sequence
  Made in the lab
aagggttggttaggcaatcatt

SEQ ID NO: 3066 - DNA, 23 bp, Artificial Sequence
  Made in the lab
aaagggttggttaggcaatcatt

SEQ ID NO: 3067 - DNA, 24 bp, Artificial Sequence
  Made in the lab
gaaagggttggttaggcaatcatt

SEQ ID NO: 3068 - DNA, 25 bp, Artificial Sequence
  Made in the lab
ggaaagggttggttaggcaatcatt

SEQ ID NO: 3069 - DNA, 26 bp, Artificial Sequence
  Made in the lab
gggaaagggttggttaggcaatcatt

SEQ ID NO: 3070 - DNA, 27 bp, Artificial Sequence
  Made in the lab
ggggaaagggttggttaggcaatcatt

SEQ ID NO: 3071 - DNA, 28 bp, Artificial Sequence
  Made in the lab
aggggaaagggttggttaggcaatcatt

SEQ ID NO: 3072 - DNA, 29 bp, Artificial Sequence
  Made in the lab
aaggggaaagggttggttaggcaatcatt

SEQ ID NO: 3073 - DNA, 30 bp, Artificial Sequence
  Made in the lab
caaggggaaagggttggttaggcaatcatt

SEQ ID NO: 3074 - DNA, 21 bp, Artificial Sequence
  Made in the lab
caggataggaagagcataata

SEQ ID NO: 3075 - DNA, 22 bp, Artificial Sequence
  Made in the lab
acaggataggaagagcataata

SEQ ID NO: 3076 - DNA, 23 bp, Artificial Sequence
  Made in the lab
tacaggataggaagagcataata

SEQ ID NO: 3077 - DNA, 24 bp, Artificial Sequence
  Made in the lab
gtacaggataggaagagcataata

SEQ ID NO: 3078 - DNA, 25 bp, Artificial Sequence
  Made in the lab
agtacaggataggaagagcataata

SEQ ID NO: 3079 - DNA, 26 bp, Artificial Sequence
  Made in the lab
aagtacaggataggaagagcataata

SEQ ID NO: 3080 - DNA, 27 bp, Artificial Sequence
  Made in the lab
gaagtacaggataggaagagcataata

SEQ ID NO: 3081 - DNA, 28 bp, Artificial Sequence
  Made in the lab
agaagtacaggataggaagagcataata

SEQ ID NO: 3082 - DNA, 29 bp, Artificial Sequence
  Made in the lab
aagaagtacaggataggaagagcataata

SEQ ID NO: 3083 - DNA, 30 bp, Artificial Sequence
  Made in the lab
aaagaagtacaggataggaagagcataata

SEQ ID NO: 3084 - DNA, 21 bp, Artificial Sequence
  Made in the lab
ggtgttttctagtttaagttg

SEQ ID NO: 3085 - DNA, 22 bp, Artificial Sequence
  Made in the lab
aggtgttttctagtttaagttg

SEQ ID NO: 3086 - DNA, 23 bp, Artificial Sequence
  Made in the lab
aaggtgttttctagtttaagttg

SEQ ID NO: 3087 - DNA, 24 bp, Artificial Sequence
  Made in the lab
gaaggtgttttctagtttaagttg

SEQ ID NO: 3088 - DNA, 25 bp, Artificial Sequence
  Made in the lab
tgaaggtgttttctagtttaagttg

SEQ ID NO: 3089 - DNA, 26 bp, Artificial Sequence
  Made in the lab
atgaaggtgttttctagtttaagttg

SEQ ID NO: 3090 - DNA, 27 bp, Artificial Sequence
  Made in the lab
tatgaaggtgttttctagtttaagttg

SEQ ID NO: 3091 - DNA, 28 bp, Artificial Sequence
  Made in the lab
atatgaaggtgttttctagtttaagttg

SEQ ID NO: 3092 - DNA, 29 bp, Artificial Sequence
  Made in the lab
aatatgaaggtgttttctagtttaagttg

SEQ ID NO: 3093 - DNA, 30 bp, Artificial Sequence
  Made in the lab
taatatgaaggtgttttctagtttaagttg

SEQ ID NO: 3094 - DNA, 21 bp, Artificial Sequence
  Made in the lab
ggagctcattttctttccaga

SEQ ID NO: 3095 - DNA, 22 bp, Artificial Sequence
  Made in the lab
aggagctcattttctttccaga

SEQ ID NO: 3096 - DNA, 23 bp, Artificial Sequence
  Made in the lab
aaggagctcattttctttccaga

SEQ ID NO: 3097 - DNA, 24 bp, Artificial Sequence
  Made in the lab
caaggagctcattttctttccaga

SEQ ID NO: 3098 - DNA, 25 bp, Artificial Sequence
  Made in the lab
acaaggagctcattttctttccaga

SEQ ID NO: 3099 - DNA, 26 bp, Artificial Sequence
  Made in the lab
cacaaggagctcattttctttccaga

SEQ ID NO: 3100 - DNA, 27 bp, Artificial Sequence
  Made in the lab
ccacaaggagctcattttctttccaga

SEQ ID NO: 3101 - DNA, 28 bp, Artificial Sequence
  Made in the lab
tccacaaggagctcattttctttccaga

SEQ ID NO: 3102 - DNA, 29 bp, Artificial Sequence
  Made in the lab
ctccacaaggagctcattttctttccaga

SEQ ID NO: 3103 - DNA, 30 bp, Artificial Sequence
  Made in the lab
cctccacaaggagctcattttctttccaga

SEQ ID NO: 3104 - DNA, 21 bp, Artificial Sequence
  Made in the lab
ggagcagtatgtacacagtca

SEQ ID NO: 3105 - DNA, 22 bp, Artificial Sequence
  Made in the lab
aggagcagtatgtacacagtca

SEQ ID NO: 3106 - DNA, 23 bp, Artificial Sequence
  Made in the lab
aaggagcagtatgtacacagtca

SEQ ID NO: 3107 - DNA, 24 bp, Artificial Sequence
  Made in the lab
caaggagcagtatgtacacagtca

SEQ ID NO: 3108 - DNA, 25 bp, Artificial Sequence
  Made in the lab
acaaggagcagtatgtacacagtca

SEQ ID NO: 3109 - DNA, 26 bp, Artificial Sequence
  Made in the lab
aacaaggagcagtatgtacacagtca

SEQ ID NO: 3110 - DNA, 27 bp, Artificial Sequence
  Made in the lab
caacaaggagcagtatgtacacagtca

SEQ ID NO: 3111 - DNA, 28 bp, Artificial Sequence
  Made in the lab
tcaacaaggagcagtatgtacacagtca

SEQ ID NO: 3112 - DNA, 29 bp, Artificial Sequence
  Made in the lab
ctcaacaaggagcagtatgtacacagtca

SEQ ID NO: 3113 - DNA, 30 bp, Artificial Sequence
  Made in the lab
tctcaacaaggagcagtatgtacacagtca

SEQ ID NO: 3114 - DNA, 21 bp, Artificial Sequence
  Made in the lab
ctcgtgaccgcaagcgattca

SEQ ID NO: 3115 - DNA, 22 bp, Artificial Sequence
  Made in the lab
actcgtgaccgcaagcgattca

SEQ ID NO: 3116 - DNA, 23 bp, Artificial Sequence
  Made in the lab
aactcgtgaccgcaagcgattca

SEQ ID NO: 3117 - DNA, 24 bp, Artificial Sequence
  Made in the lab
gaactcgtgaccgcaagcgattca

SEQ ID NO: 3118 - DNA, 25 bp, Artificial Sequence
  Made in the lab
cgaactcgtgaccgcaagcgattca

SEQ ID NO: 3119 - DNA, 26 bp, Artificial Sequence
  Made in the lab
tcgaactcgtgaccgcaagcgattca

SEQ ID NO: 3120 - DNA, 27 bp, Artificial Sequence
  Made in the lab
ctcgaactcgtgaccgcaagcgattca

SEQ ID NO: 3121 - DNA, 28 bp, Artificial Sequence
  Made in the lab
tctcgaactcgtgaccgcaagcgattca

SEQ ID NO: 3122 - DNA, 29 bp, Artificial Sequence
  Made in the lab
gtctcgaactcgtgaccgcaagcgattca

SEQ ID NO: 3123 - DNA, 30 bp, Artificial Sequence
  Made in the lab
agtctcgaactcgtgaccgcaagcgattca

SEQ ID NO: 3124 - DNA, 21 bp, Artificial Sequence
  Made in the lab
ttcagatatttccagagaatg

SEQ ID NO: 3125 - DNA, 22 bp, Artificial Sequence
  Made in the lab
attcagatatttccagagaatg

SEQ ID NO: 3126 - DNA, 23 bp, Artificial Sequence
  Made in the lab
aattcagatatttccagagaatg

SEQ ID NO: 3127 - DNA, 24 bp, Artificial Sequence
  Made in the lab
gaattcagatatttccagagaatg

SEQ ID NO: 3128 - DNA, 25 bp, Artificial Sequence
  Made in the lab
tgaattcagatatttccagagaatg

SEQ ID NO: 3129 - DNA, 26 bp, Artificial Sequence
  Made in the lab
atgaattcagatatttccagagaatg

SEQ ID NO: 3130 - DNA, 27 bp, Artificial Sequence
  Made in the lab
aatgaattcagatatttccagagaatg

SEQ ID NO: 3131 - DNA, 28 bp, Artificial Sequence
  Made in the lab
gaatgaattcagatatttccagagaatg

SEQ ID NO: 3132 - DNA, 29 bp, Artificial Sequence
  Made in the lab
ggaatgaattcagatatttccagagaatg

SEQ ID NO: 3133 - DNA, 30 bp, Artificial Sequence
  Made in the lab
aggaatgaattcagatatttccagagaatg

SEQ ID NO: 3134 - DNA, 21 bp, Artificial Sequence
  Made in the lab
gcaggaaaaccaattataagt

SEQ ID NO: 3135 - DNA, 22 bp, Artificial Sequence
  Made in the lab
agcaggaaaaccaattataagt

SEQ ID NO: 3136 - DNA, 23 bp, Artificial Sequence
  Made in the lab
aagcaggaaaaccaattataagt

SEQ ID NO: 3137 - DNA, 24 bp, Artificial Sequence
  Made in the lab
gaagcaggaaaaccaattataagt

SEQ ID NO: 3138 - DNA, 25 bp, Artificial Sequence
  Made in the lab
agaagcaggaaaaccaattataagt

SEQ ID NO: 3139 - DNA, 26 bp, Artificial Sequence
  Made in the lab
cagaagcaggaaaaccaattataagt

SEQ ID NO: 3140 - DNA, 27 bp, Artificial Sequence
  Made in the lab
acagaagcaggaaaaccaattataagt

SEQ ID NO: 3141 - DNA, 28 bp, Artificial Sequence
  Made in the lab
tacagaagcaggaaaaccaattataagt

SEQ ID NO: 3142 - DNA, 29 bp, Artificial Sequence
  Made in the lab
atacagaagcaggaaaaccaattataagt

SEQ ID NO: 3143 - DNA, 30 bp, Artificial Sequence
  Made in the lab
aatacagaagcaggaaaaccaattataagt

SEQ ID NO: 3144 - DNA, 21 bp, Artificial Sequence
  Made in the lab
gggtgaaggtaaaataataca

SEQ ID NO: 3145 - DNA, 22 bp, Artificial Sequence
  Made in the lab
agggtgaaggtaaaataataca

SEQ ID NO: 3146 - DNA, 23 bp, Artificial Sequence
  Made in the lab
aagggtgaaggtaaaataataca

SEQ ID NO: 3147 - DNA, 24 bp, Artificial Sequence
  Made in the lab
caagggtgaaggtaaaataataca

SEQ ID NO: 3148 - DNA, 25 bp, Artificial Sequence
  Made in the lab
tcaagggtgaaggtaaaataataca

SEQ ID NO: 3149 - DNA, 26 bp, Artificial Sequence
  Made in the lab
atcaagggtgaaggtaaaataataca

SEQ ID NO: 3150 - DNA, 27 bp, Artificial Sequence
  Made in the lab
aatcaagggtgaaggtaaaataataca

SEQ ID NO: 3151 - DNA, 28 bp, Artificial Sequence
  Made in the lab
taatcaagggtgaaggtaaaataataca

SEQ ID NO: 3152 - DNA, 29 bp, Artificial Sequence
  Made in the lab
ataatcaagggtgaaggtaaaataataca

SEQ ID NO: 3153 - DNA, 30 bp, Artificial Sequence
  Made in the lab
aataatcaagggtgaaggtaaaataataca

SEQ ID NO: 3154 - DNA, 21 bp, Artificial Sequence
  Made in the lab
ggtaaacagaatctggtgatt

SEQ ID NO: 3155 - DNA, 22 bp, Artificial Sequence
  Made in the lab
aggtaaacagaatctggtgatt

SEQ ID NO: 3156 - DNA, 23 bp, Artificial Sequence
  Made in the lab
aaggtaaacagaatctggtgatt

SEQ ID NO: 3157 - DNA, 24 bp, Artificial Sequence
  Made in the lab
gaaggtaaacagaatctggtgatt

SEQ ID NO: 3158 - DNA, 25 bp, Artificial Sequence
  Made in the lab
agaaggtaaacagaatctggtgatt

SEQ ID NO: 3159 - DNA, 26 bp, Artificial Sequence
  Made in the lab
tagaaggtaaacagaatctggtgatt

SEQ ID NO: 3160 - DNA, 27 bp, Artificial Sequence
  Made in the lab
gtagaaggtaaacagaatctggtgatt

SEQ ID NO: 3161 - DNA, 28 bp, Artificial Sequence
  Made in the lab
agtagaaggtaaacagaatctggtgatt

SEQ ID NO: 3162 - DNA, 29 bp, Artificial Sequence
  Made in the lab
cagtagaaggtaaacagaatctggtgatt

SEQ ID NO: 3163 - DNA, 30 bp, Artificial Sequence
  Made in the lab
tcagtagaaggtaaacagaatctggtgatt

SEQ ID NO: 3164 - DNA, 21 bp, Artificial Sequence
  Made in the lab
gtctagatgatgccttaaaac

SEQ ID NO: 3165 - DNA, 22 bp, Artificial Sequence
  Made in the lab
agtctagatgatgccttaaaac

SEQ ID NO: 3166 - DNA, 23 bp, Artificial Sequence
  Made in the lab
aagtctagatgatgccttaaaac

SEQ ID NO: 3167 - DNA, 24 bp, Artificial Sequence
  Made in the lab
gaagtctagatgatgccttaaaac

SEQ ID NO: 3168 - DNA, 25 bp, Artificial Sequence
  Made in the lab
agaagtctagatgatgccttaaaac

SEQ ID NO: 3169 - DNA, 26 bp, Artificial Sequence
  Made in the lab
cagaagtctagatgatgccttaaaac

SEQ ID NO: 3170 - DNA, 27 bp, Artificial Sequence
  Made in the lab
ccagaagtctagatgatgccttaaaac

SEQ ID NO: 3171 - DNA, 28 bp, Artificial Sequence
  Made in the lab
tccagaagtctagatgatgccttaaaac

SEQ ID NO: 3172 - DNA, 29 bp, Artificial Sequence
  Made in the lab
ttccagaagtctagatgatgccttaaaac

SEQ ID NO: 3173 - DNA, 30 bp, Artificial Sequence
  Made in the lab
tttccagaagtctagatgatgccttaaaac

SEQ ID NO: 3174 - DNA, 21 bp, Artificial Sequence
  Made in the lab
gactttgaaagtgacacgttt

SEQ ID NO: 3175 - DNA, 22 bp, Artificial Sequence
  Made in the lab
agactttgaaagtgacacgttt

SEQ ID NO: 3176 - DNA, 23 bp, Artificial Sequence
  Made in the lab
aagactttgaaagtgacacgttt

SEQ ID NO: 3177 - DNA, 24 bp, Artificial Sequence
  Made in the lab
caagactttgaaagtgacacgttt

SEQ ID NO: 3178 - DNA, 25 bp, Artificial Sequence
  Made in the lab
gcaagactttgaaagtgacacgttt

SEQ ID NO: 3179 - DNA, 26 bp, Artificial Sequence
  Made in the lab
tgcaagactttgaaagtgacacgttt

SEQ ID NO: 3180 - DNA, 27 bp, Artificial Sequence
  Made in the lab
atgcaagactttgaaagtgacacgttt

SEQ ID NO: 3181 - DNA, 28 bp, Artificial Sequence
  Made in the lab
catgcaagactttgaaagtgacacgttt

SEQ ID NO: 3182 - DNA, 29 bp, Artificial Sequence
  Made in the lab
tcatgcaagactttgaaagtgacacgttt

SEQ ID NO: 3183 - DNA, 30 bp, Artificial Sequence
  Made in the lab
atcatgcaagactttgaaagtgacacgttt

SEQ ID NO: 3184 - DNA, 21 bp, Artificial Sequence
  Made in the lab
ccatgccttcataattctaga

SEQ ID NO: 3185 - DNA, 22 bp, Artificial Sequence
  Made in the lab
accatgccttcataattctaga

SEQ ID NO: 3186 - DNA, 23 bp, Artificial Sequence
  Made in the lab
aaccatgccttcataattctaga

SEQ ID NO: 3187 - DNA, 24 bp, Artificial Sequence
  Made in the lab
gaaccatgccttcataattctaga

SEQ ID NO: 3188 - DNA, 25 bp, Artificial Sequence
  Made in the lab
ggaaccatgccttcataattctaga

SEQ ID NO: 3189 - DNA, 26 bp, Artificial Sequence
  Made in the lab
tggaaccatgccttcataattctaga

SEQ ID NO: 3190 - DNA, 27 bp, Artificial Sequence
  Made in the lab
atggaaccatgccttcataattctaga

SEQ ID NO: 3191 - DNA, 28 bp, Artificial Sequence
  Made in the lab
aatggaaccatgccttcataattctaga

SEQ ID NO: 3192 - DNA, 29 bp, Artificial Sequence
  Made in the lab
caatggaaccatgccttcataattctaga

SEQ ID NO: 3193 - DNA, 30 bp, Artificial Sequence
  Made in the lab
acaatggaaccatgccttcataattctaga

SEQ ID NO: 3194 - DNA, 21 bp, Artificial Sequence
  Made in the lab
ggtaactaacggaaggaaaaa

SEQ ID NO: 3195 - DNA, 22 bp, Artificial Sequence
  Made in the lab
aggtaactaacggaaggaaaaa

SEQ ID NO: 3196 - DNA, 23 bp, Artificial Sequence
  Made in the lab
aaggtaactaacggaaggaaaaa

SEQ ID NO: 3197 - DNA, 24 bp, Artificial Sequence
  Made in the lab
gaaggtaactaacggaaggaaaaa

SEQ ID NO: 3198 - DNA, 25 bp, Artificial Sequence
  Made in the lab
tgaaggtaactaacggaaggaaaaa

SEQ ID NO: 3199 - DNA, 26 bp, Artificial Sequence
  Made in the lab
atgaaggtaactaacggaaggaaaaa

SEQ ID NO: 3200 - DNA, 27 bp, Artificial Sequence
  Made in the lab
catgaaggtaactaacggaaggaaaaa

SEQ ID NO: 3201 - DNA, 28 bp, Artificial Sequence
  Made in the lab
ccatgaaggtaactaacggaaggaaaaa

SEQ ID NO: 3202 - DNA, 29 bp, Artificial Sequence
  Made in the lab
cccatgaaggtaactaacggaaggaaaaa

SEQ ID NO: 3203 - DNA, 30 bp, Artificial Sequence
  Made in the lab
acccatgaaggtaactaacggaaggaaaaa

SEQ ID NO: 3204 - DNA, 21 bp, Artificial Sequence
  Made in the lab
ctaacggaaggaaaaactaag

SEQ ID NO: 3205 - DNA, 22 bp, Artificial Sequence
  Made in the lab
actaacggaaggaaaaactaag

SEQ ID NO: 3206 - DNA, 23 bp, Artificial Sequence
  Made in the lab
aactaacggaaggaaaaactaag

SEQ ID NO: 3207 - DNA, 24 bp, Artificial Sequence
  Made in the lab
taactaacggaaggaaaaactaag

SEQ ID NO: 3208 - DNA, 25 bp, Artificial Sequence
  Made in the lab
gtaactaacggaaggaaaaactaag

SEQ ID NO: 3209 - DNA, 26 bp, Artificial Sequence
  Made in the lab
ggtaactaacggaaggaaaaactaag

SEQ ID NO: 3210 - DNA, 27 bp, Artificial Sequence
  Made in the lab
aggtaactaacggaaggaaaaactaag

SEQ ID NO: 3211 - DNA, 28 bp, Artificial Sequence
  Made in the lab
aaggtaactaacggaaggaaaaactaag

SEQ ID NO: 3212 - DNA, 29 bp, Artificial Sequence
  Made in the lab
gaaggtaactaacggaaggaaaaactaag

SEQ ID NO: 3213 - DNA, 30 bp, Artificial Sequence
  Made in the lab
tgaaggtaactaacggaaggaaaaactaag

SEQ ID NO: 3214 - DNA, 21 bp, Artificial Sequence
  Made in the lab
tttaaagtcagcgagcaggtt

SEQ ID NO: 3215 - DNA, 22 bp, Artificial Sequence
  Made in the lab
atttaaagtcagcgagcaggtt

SEQ ID NO: 3216 - DNA, 23 bp, Artificial Sequence
  Made in the lab
aatttaaagtcagcgagcaggtt

SEQ ID NO: 3217 - DNA, 24 bp, Artificial Sequence
  Made in the lab
caatttaaagtcagcgagcaggtt

SEQ ID NO: 3218 - DNA, 25 bp, Artificial Sequence
  Made in the lab
gcaatttaaagtcagcgagcaggtt

SEQ ID NO: 3219 - DNA, 26 bp, Artificial Sequence
  Made in the lab
agcaatttaaagtcagcgagcaggtt

SEQ ID NO: 3220 - DNA, 27 bp, Artificial Sequence
  Made in the lab
aagcaatttaaagtcagcgagcaggtt

SEQ ID NO: 3221 - DNA, 28 bp, Artificial Sequence
  Made in the lab
aaagcaatttaaagtcagcgagcaggtt

SEQ ID NO: 3222 - DNA, 29 bp, Artificial Sequence
  Made in the lab
aaaagcaatttaaagtcagcgagcaggtt

SEQ ID NO: 3223 - DNA, 30 bp, Artificial Sequence
  Made in the lab
gaaaagcaatttaaagtcagcgagcaggtt

SEQ ID NO: 3224 - DNA, 21 bp, Artificial Sequence
  Made in the lab
agtataaggccacacatggtt

SEQ ID NO: 3225 - DNA, 22 bp, Artificial Sequence
  Made in the lab
aagtataaggccacacatggtt

SEQ ID NO: 3226 - DNA, 23 bp, Artificial Sequence
  Made in the lab
aaagtataaggccacacatggtt

SEQ ID NO: 3227 - DNA, 24 bp, Artificial Sequence
  Made in the lab
aaaagtataaggccacacatggtt

SEQ ID NO: 3228 - DNA, 25 bp, Artificial Sequence
  Made in the lab
aaaaagtataaggccacacatggtt

SEQ ID NO: 3229 - DNA, 26 bp, Artificial Sequence
  Made in the lab
taaaaagtataaggccacacatggtt

SEQ ID NO: 3230 - DNA, 27 bp, Artificial Sequence
  Made in the lab
gtaaaaagtataaggccacacatggtt

SEQ ID NO: 3231 - DNA, 28 bp, Artificial Sequence
  Made in the lab
agtaaaaagtataaggccacacatggtt

SEQ ID NO: 3232 - DNA, 29 bp, Artificial Sequence
  Made in the lab
tagtaaaaagtataaggccacacatggtt

SEQ ID NO: 3233 - DNA, 30 bp, Artificial Sequence
  Made in the lab
gtagtaaaaagtataaggccacacatggtt

SEQ ID NO: 3234 - DNA, 21 bp, Artificial Sequence
  Made in the lab
cctccacaaggagctcatttt

SEQ ID NO: 3235 - DNA, 22 bp, Artificial Sequence
  Made in the lab
acctccacaaggagctcatttt

SEQ ID NO: 3236 - DNA, 23 bp, Artificial Sequence
  Made in the lab
aacctccacaaggagctcatttt

SEQ ID NO: 3237 - DNA, 24 bp, Artificial Sequence
  Made in the lab
gaacctccacaaggagctcatttt

SEQ ID NO: 3238 - DNA, 25 bp, Artificial Sequence
  Made in the lab
ggaacctccacaaggagctcatttt

SEQ ID NO: 3239 - DNA, 26 bp, Artificial Sequence
  Made in the lab
aggaacctccacaaggagctcatttt

SEQ ID NO: 3240 - DNA, 27 bp, Artificial Sequence
  Made in the lab
aaggaacctccacaaggagctcatttt

SEQ ID NO: 3241 - DNA, 28 bp, Artificial Sequence
  Made in the lab
caaggaacctccacaaggagctcatttt

SEQ ID NO: 3242 - DNA, 29 bp, Artificial Sequence
  Made in the lab
tcaaggaacctccacaaggagctcatttt

SEQ ID NO: 3243 - DNA, 30 bp, Artificial Sequence
  Made in the lab
ctcaaggaacctccacaaggagctcatttt

SEQ ID NO: 3244 - DNA, 21 bp, Artificial Sequence
  Made in the lab
gggttggttaggcaatcattc

SEQ ID NO: 3245 - DNA, 22 bp, Artificial Sequence
  Made in the lab
agggttggttaggcaatcattc

SEQ ID NO: 3246 - DNA, 23 bp, Artificial Sequence
  Made in the lab
aagggttggttaggcaatcattc

SEQ ID NO: 3247 - DNA, 24 bp, Artificial Sequence
  Made in the lab
aaagggttggttaggcaatcattc

SEQ ID NO: 3248 - DNA, 25 bp, Artificial Sequence
  Made in the lab
gaaagggttggttaggcaatcattc

SEQ ID NO: 3249 - DNA, 26 bp, Artificial Sequence
  Made in the lab
ggaaagggttggttaggcaatcattc

SEQ ID NO: 3250 - DNA, 27 bp, Artificial Sequence
  Made in the lab
gggaaagggttggttaggcaatcattc

SEQ ID NO: 3251 - DNA, 28 bp, Artificial Sequence
  Made in the lab
ggggaaagggttggttaggcaatcattc

SEQ ID NO: 3252 - DNA, 29 bp, Artificial Sequence
  Made in the lab
aggggaaagggttggttaggcaatcattc

SEQ ID NO: 3253 - DNA, 30 bp, Artificial Sequence
  Made in the lab
aaggggaaagggttggttaggcaatcattc

SEQ ID NO: 3254 - DNA, 21 bp, Artificial Sequence
  Made in the lab
agaacaactggcaggactgtt

SEQ ID NO: 3255 - DNA, 22 bp, Artificial Sequence
  Made in the lab
aagaacaactggcaggactgtt

SEQ ID NO: 3256 - DNA, 23 bp, Artificial Sequence
  Made in the lab
aaagaacaactggcaggactgtt

SEQ ID NO: 3257 - DNA, 24 bp, Artificial Sequence
  Made in the lab
gaaagaacaactggcaggactgtt

SEQ ID NO: 3258 - DNA, 25 bp, Artificial Sequence
  Made in the lab
ggaaagaacaactggcaggactgtt

SEQ ID NO: 3259 - DNA, 26 bp, Artificial Sequence
  Made in the lab
tggaaagaacaactggcaggactgtt

SEQ ID NO: 3260 - DNA, 27 bp, Artificial Sequence
  Made in the lab
ctggaaagaacaactggcaggactgtt

SEQ ID NO: 3261 - DNA, 28 bp, Artificial Sequence
  Made in the lab
tctggaaagaacaactggcaggactgtt

SEQ ID NO: 3262 - DNA, 29 bp, Artificial Sequence
  Made in the lab
ctctggaaagaacaactggcaggactgtt

SEQ ID NO: 3263 - DNA, 30 bp, Artificial Sequence
  Made in the lab
cctctggaaagaacaactggcaggactgtt

SEQ ID NO: 3264 - DNA, 21 bp, Artificial Sequence
  Made in the lab
ctggcaggactgttgttttca

SEQ ID NO: 3265 - DNA, 22 bp, Artificial Sequence
  Made in the lab
actggcaggactgttgttttca

SEQ ID NO: 3266 - DNA, 23 bp, Artificial Sequence
  Made in the lab
aactggcaggactgttgttttca

SEQ ID NO: 3267 - DNA, 24 bp, Artificial Sequence
  Made in the lab
caactggcaggactgttgttttca

SEQ ID NO: 3268 - DNA, 25 bp, Artificial Sequence
  Made in the lab
acaactggcaggactgttgttttca

SEQ ID NO: 3269 - DNA, 26 bp, Artificial Sequence
  Made in the lab
aacaactggcaggactgttgttttca

SEQ ID NO: 3270 - DNA, 27 bp, Artificial Sequence
  Made in the lab
gaacaactggcaggactgttgttttca

SEQ ID NO: 3271 - DNA, 28 bp, Artificial Sequence
  Made in the lab
agaacaactggcaggactgttgttttca

SEQ ID NO: 3272 - DNA, 29 bp, Artificial Sequence
  Made in the lab
aagaacaactggcaggactgttgttttca

SEQ ID NO: 3273 - DNA, 30 bp, Artificial Sequence
  Made in the lab
aaagaacaactggcaggactgttgttttca

SEQ ID NO: 3274 - DNA, 21 bp, Artificial Sequence
  Made in the lab
ggctgcagtgagtcgtgattg

SEQ ID NO: 3275 - DNA, 22 bp, Artificial Sequence
  Made in the lab
aggctgcagtgagtcgtgattg

SEQ ID NO: 3276 - DNA, 23 bp, Artificial Sequence
  Made in the lab
aaggctgcagtgagtcgtgattg

SEQ ID NO: 3277 - DNA, 24 bp, Artificial Sequence
  Made in the lab
caaggctgcagtgagtcgtgattg

SEQ ID NO: 3278 - DNA, 25 bp, Artificial Sequence
  Made in the lab
tcaaggctgcagtgagtcgtgattg

SEQ ID NO: 3279 - DNA, 26 bp, Artificial Sequence
  Made in the lab
ttcaaggctgcagtgagtcgtgattg

SEQ ID NO: 3280 - DNA, 27 bp, Artificial Sequence
  Made in the lab
gttcaaggctgcagtgagtcgtgattg

SEQ ID NO: 3281 - DNA, 28 bp, Artificial Sequence
  Made in the lab
agttcaaggctgcagtgagtcgtgattg

SEQ ID NO: 3282 - DNA, 29 bp, Artificial Sequence
  Made in the lab
gagttcaaggctgcagtgagtcgtgattg

SEQ ID NO: 3283 - DNA, 30 bp, Artificial Sequence
  Made in the lab
cgagttcaaggctgcagtgagtcgtgattg

SEQ ID NO: 3284 - DNA, 21 bp, Artificial Sequence
  Made in the lab
gaagcaggaaaaccaattata

SEQ ID NO: 3285 - DNA, 22 bp, Artificial Sequence
  Made in the lab
agaagcaggaaaaccaattata

SEQ ID NO: 3286 - DNA, 23 bp, Artificial Sequence
  Made in the lab
cagaagcaggaaaaccaattata

SEQ ID NO: 3287 - DNA, 24 bp, Artificial Sequence
  Made in the lab
acagaagcaggaaaaccaattata

SEQ ID NO: 3288 - DNA, 25 bp, Artificial Sequence
  Made in the lab
tacagaagcaggaaaaccaattata

SEQ ID NO: 3289 - DNA, 26 bp, Artificial Sequence
  Made in the lab
atacagaagcaggaaaaccaattata

SEQ ID NO: 3290 - DNA, 27 bp, Artificial Sequence
  Made in the lab
aatacagaagcaggaaaaccaattata

SEQ ID NO: 3291 - DNA, 28 bp, Artificial Sequence
  Made in the lab
aaatacagaagcaggaaaaccaattata

SEQ ID NO: 3292 - DNA, 29 bp, Artificial Sequence
  Made in the lab
aaaatacagaagcaggaaaaccaattata

SEQ ID NO: 3293 - DNA, 30 bp, Artificial Sequence
  Made in the lab
aaaaatacagaagcaggaaaaccaattata

SEQ ID NO: 3294 - DNA, 21 bp, Artificial Sequence
  Made in the lab
gatgcctttgagaaatgaatg

SEQ ID NO: 3295 - DNA, 22 bp, Artificial Sequence
  Made in the lab
agatgcctttgagaaatgaatg

SEQ ID NO: 3296 - DNA, 23 bp, Artificial Sequence
  Made in the lab
cagatgcctttgagaaatgaatg

SEQ ID NO: 3297 - DNA, 24 bp, Artificial Sequence
  Made in the lab
tcagatgcctttgagaaatgaatg

SEQ ID NO: 3298 - DNA, 25 bp, Artificial Sequence
  Made in the lab
ttcagatgcctttgagaaatgaatg

SEQ ID NO: 3299 - DNA, 26 bp, Artificial Sequence
  Made in the lab
tttcagatgcctttgagaaatgaatg

SEQ ID NO: 3300 - DNA, 27 bp, Artificial Sequence
  Made in the lab
gtttcagatgcctttgagaaatgaatg

SEQ ID NO: 3301 - DNA, 28 bp, Artificial Sequence
  Made in the lab
agtttcagatgcctttgagaaatgaatg

SEQ ID NO: 3302 - DNA, 29 bp, Artificial Sequence
  Made in the lab
gagtttcagatgcctttgagaaatgaatg

SEQ ID NO: 3303 - DNA, 30 bp, Artificial Sequence
  Made in the lab
ggagtttcagatgcctttgagaaatgaatg

SEQ ID NO: 3304 - DNA, 21 bp, Artificial Sequence
  Made in the lab
gggaagctgttggagaaaata

SEQ ID NO: 3305 - DNA, 22 bp, Artificial Sequence
  Made in the lab
agggaagctgttggagaaaata

SEQ ID NO: 3306 - DNA, 23 bp, Artificial Sequence
  Made in the lab
tagggaagctgttggagaaaata

SEQ ID NO: 3307 - DNA, 24 bp, Artificial Sequence
  Made in the lab
ttagggaagctgttggagaaaata

SEQ ID NO: 3308 - DNA, 25 bp, Artificial Sequence
  Made in the lab
tttagggaagctgttggagaaaata

SEQ ID NO: 3309 - DNA, 26 bp, Artificial Sequence
  Made in the lab
ttttagggaagctgttggagaaaata

SEQ ID NO: 3310 - DNA, 27 bp, Artificial Sequence
  Made in the lab
tttttagggaagctgttggagaaaata

SEQ ID NO: 3311 - DNA, 28 bp, Artificial Sequence
  Made in the lab
ctttttagggaagctgttggagaaaata

SEQ ID NO: 3312 - DNA, 29 bp, Artificial Sequence
  Made in the lab
cctttttagggaagctgttggagaaaata

SEQ ID NO: 3313 - DNA, 30 bp, Artificial Sequence
  Made in the lab
ccctttttagggaagctgttggagaaaata

SEQ ID NO: 3314 - DNA, 21 bp, Artificial Sequence
  Made in the lab
gcgagcaggttctcattgata

SEQ ID NO: 3315 - DNA, 22 bp, Artificial Sequence
  Made in the lab
agcgagcaggttctcattgata

SEQ ID NO: 3316 - DNA, 23 bp, Artificial Sequence
  Made in the lab
cagcgagcaggttctcattgata

SEQ ID NO: 3317 - DNA, 24 bp, Artificial Sequence
  Made in the lab
tcagcgagcaggttctcattgata

SEQ ID NO: 3318 - DNA, 25 bp, Artificial Sequence
  Made in the lab
gtcagcgagcaggttctcattgata

SEQ ID NO: 3319 - DNA, 26 bp, Artificial Sequence
  Made in the lab
agtcagcgagcaggttctcattgata

SEQ ID NO: 3320 - DNA, 27 bp, Artificial Sequence
  Made in the lab
aagtcagcgagcaggttctcattgata

SEQ ID NO: 3321 - DNA, 28 bp, Artificial Sequence
  Made in the lab
aaagtcagcgagcaggttctcattgata

SEQ ID NO: 3322 - DNA, 29 bp, Artificial Sequence
  Made in the lab
taaagtcagcgagcaggttctcattgata

SEQ ID NO: 3323 - DNA, 30 bp, Artificial Sequence
  Made in the lab
ttaaagtcagcgagcaggttctcattgata

SEQ ID NO: 3324 - DNA, 21 bp, Artificial Sequence
  Made in the lab
cccggcacatcttcattcttt

SEQ ID NO: 3325 - DNA, 22 bp, Artificial Sequence
  Made in the lab
acccggcacatcttcattcttt

SEQ ID NO: 3326 - DNA, 23 bp, Artificial Sequence
  Made in the lab
cacccggcacatcttcattcttt

SEQ ID NO: 3327 - DNA, 24 bp, Artificial Sequence
  Made in the lab
acacccggcacatcttcattcttt

SEQ ID NO: 3328 - DNA, 25 bp, Artificial Sequence
  Made in the lab
cacacccggcacatcttcattcttt

SEQ ID NO: 3329 - DNA, 26 bp, Artificial Sequence
  Made in the lab
ccacacccggcacatcttcattcttt

SEQ ID NO: 3330 - DNA, 27 bp, Artificial Sequence
  Made in the lab
accacacccggcacatcttcattcttt

SEQ ID NO: 3331 - DNA, 28 bp, Artificial Sequence
  Made in the lab
caccacacccggcacatcttcattcttt

SEQ ID NO: 3332 - DNA, 29 bp, Artificial Sequence
  Made in the lab
ccaccacacccggcacatcttcattcttt

SEQ ID NO: 3333 - DNA, 30 bp, Artificial Sequence
  Made in the lab
gccaccacacccggcacatcttcattcttt

SEQ ID NO: 3334 - DNA, 21 bp, Artificial Sequence
  Made in the lab
gccgcttatcctgttttcatg

SEQ ID NO: 3335 - DNA, 22 bp, Artificial Sequence
  Made in the lab
agccgcttatcctgttttcatg

SEQ ID NO: 3336 - DNA, 23 bp, Artificial Sequence
  Made in the lab
aagccgcttatcctgttttcatg

SEQ ID NO: 3337 - DNA, 24 bp, Artificial Sequence
  Made in the lab
gaagccgcttatcctgttttcatg

SEQ ID NO: 3338 - DNA, 25 bp, Artificial Sequence
  Made in the lab
ggaagccgcttatcctgttttcatg

SEQ ID NO: 3339 - DNA, 26 bp, Artificial Sequence
  Made in the lab
aggaagccgcttatcctgttttcatg

SEQ ID NO: 3340 - DNA, 27 bp, Artificial Sequence
  Made in the lab
gaggaagccgcttatcctgttttcatg

SEQ ID NO: 3341 - DNA, 28 bp, Artificial Sequence
  Made in the lab
ggaggaagccgcttatcctgttttcatg

SEQ ID NO: 3342 - DNA, 29 bp, Artificial Sequence
  Made in the lab
cggaggaagccgcttatcctgttttcatg

SEQ ID NO: 3343 - DNA, 30 bp, Artificial Sequence
  Made in the lab
acggaggaagccgcttatcctgttttcatg

SEQ ID NO: 3344 - DNA, 21 bp, Artificial Sequence
  Made in the lab
gctgagcactaaaggaatttc

SEQ ID NO: 3345 - DNA, 22 bp, Artificial Sequence
  Made in the lab
agctgagcactaaaggaatttc

SEQ ID NO: 3346 - DNA, 23 bp, Artificial Sequence
  Made in the lab
cagctgagcactaaaggaatttc

SEQ ID NO: 3347 - DNA, 24 bp, Artificial Sequence
  Made in the lab
acagctgagcactaaaggaatttc

SEQ ID NO: 3348 - DNA, 25 bp, Artificial Sequence
  Made in the lab
gacagctgagcactaaaggaatttc

SEQ ID NO: 3349 - DNA, 26 bp, Artificial Sequence
  Made in the lab
ggacagctgagcactaaaggaatttc

SEQ ID NO: 3350 - DNA, 27 bp, Artificial Sequence
  Made in the lab
tggacagctgagcactaaaggaatttc

SEQ ID NO: 3351 - DNA, 28 bp, Artificial Sequence
  Made in the lab
atggacagctgagcactaaaggaatttc

SEQ ID NO: 3352 - DNA, 29 bp, Artificial Sequence
  Made in the lab
catggacagctgagcactaaaggaatttc

SEQ ID NO: 3353 - DNA, 30 bp, Artificial Sequence
  Made in the lab
tcatggacagctgagcactaaaggaatttc

SEQ ID NO: 3354 - DNA, 21 bp, Artificial Sequence
  Made in the lab
agcggctggagacctattaca

SEQ ID NO: 3355 - DNA, 22 bp, Artificial Sequence
  Made in the lab
aagcggctggagacctattaca

SEQ ID NO: 3356 - DNA, 23 bp, Artificial Sequence
  Made in the lab
aaagcggctggagacctattaca

SEQ ID NO: 3357 - DNA, 24 bp, Artificial Sequence
  Made in the lab
aaaagcggctggagacctattaca

SEQ ID NO: 3358 - DNA, 25 bp, Artificial Sequence
  Made in the lab
aaaaagcggctggagacctattaca

SEQ ID NO: 3359 - DNA, 26 bp, Artificial Sequence
  Made in the lab
caaaaagcggctggagacctattaca

SEQ ID NO: 3360 - DNA, 27 bp, Artificial Sequence
  Made in the lab
tcaaaaagcggctggagacctattaca

SEQ ID NO: 3361 - DNA, 28 bp, Artificial Sequence
  Made in the lab
atcaaaaagcggctggagacctattaca

SEQ ID NO: 3362 - DNA, 29 bp, Artificial Sequence
  Made in the lab
catcaaaaagcggctggagacctattaca

SEQ ID NO: 3363 - DNA, 30 bp, Artificial Sequence
  Made in the lab
ccatcaaaaagcggctggagacctattaca

SEQ ID NO: 3364 - DNA, 21 bp, Artificial Sequence
  Made in the lab
acgtggcattgtgcgcaaggt

SEQ ID NO: 3365 - DNA, 22 bp, Artificial Sequence
  Made in the lab
aacgtggcattgtgcgcaaggt

SEQ ID NO: 3366 - DNA, 23 bp, Artificial Sequence
  Made in the lab
aaacgtggcattgtgcgcaaggt

SEQ ID NO: 3367 - DNA, 24 bp, Artificial Sequence
  Made in the lab
gaaacgtggcattgtgcgcaaggt

SEQ ID NO: 3368 - DNA, 25 bp, Artificial Sequence
  Made in the lab
agaaacgtggcattgtgcgcaaggt

SEQ ID NO: 3369 - DNA, 26 bp, Artificial Sequence
  Made in the lab
gagaaacgtggcattgtgcgcaaggt

SEQ ID NO: 3370 - DNA, 27 bp, Artificial Sequence
  Made in the lab
tgagaaacgtggcattgtgcgcaaggt

SEQ ID NO: 3371 - DNA, 28 bp, Artificial Sequence
  Made in the lab
atgagaaacgtggcattgtgcgcaaggt

SEQ ID NO: 3372 - DNA, 29 bp, Artificial Sequence
  Made in the lab
tatgagaaacgtggcattgtgcgcaaggt

SEQ ID NO: 3373 - DNA, 30 bp, Artificial Sequence
  Made in the lab
ctatgagaaacgtggcattgtgcgcaaggt

SEQ ID NO: 3374 - DNA, 21 bp, Artificial Sequence
  Made in the lab
agtcaatacttccaaaggctt

SEQ ID NO: 3375 - DNA, 22 bp, Artificial Sequence
  Made in the lab
aagtcaatacttccaaaggctt

SEQ ID NO: 3376 - DNA, 23 bp, Artificial Sequence
  Made in the lab
aaagtcaatacttccaaaggctt

SEQ ID NO: 3377 - DNA, 24 bp, Artificial Sequence
  Made in the lab
caaagtcaatacttccaaaggctt

SEQ ID NO: 3378 - DNA, 25 bp, Artificial Sequence
  Made in the lab
ccaaagtcaatacttccaaaggctt

SEQ ID NO: 3379 - DNA, 26 bp, Artificial Sequence
  Made in the lab
gccaaagtcaatacttccaaaggctt

SEQ ID NO: 3380 - DNA, 27 bp, Artificial Sequence
  Made in the lab
ggccaaagtcaatacttccaaaggctt

SEQ ID NO: 3381 - DNA, 28 bp, Artificial Sequence
  Made in the lab
tggccaaagtcaatacttccaaaggctt

SEQ ID NO: 3382 - DNA, 29 bp, Artificial Sequence
  Made in the lab
gtggccaaagtcaatacttccaaaggctt

SEQ ID NO: 3383 - DNA, 30 bp, Artificial Sequence
  Made in the lab
ggtggccaaagtcaatacttccaaaggctt

SEQ ID NO: 3384 - DNA, 21 bp, Artificial Sequence
  Made in the lab
tacttccaaaggcttcctgat

SEQ ID NO: 3385 - DNA, 22 bp, Artificial Sequence
  Made in the lab
atacttccaaaggcttcctgat

SEQ ID NO: 3386 - DNA, 23 bp, Artificial Sequence
  Made in the lab
aatacttccaaaggcttcctgat

SEQ ID NO: 3387 - DNA, 24 bp, Artificial Sequence
  Made in the lab
caatacttccaaaggcttcctgat

SEQ ID NO: 3388 - DNA, 25 bp, Artificial Sequence
  Made in the lab
tcaatacttccaaaggcttcctgat

SEQ ID NO: 3389 - DNA, 26 bp, Artificial Sequence
  Made in the lab
gtcaatacttccaaaggcttcctgat

SEQ ID NO: 3390 - DNA, 27 bp, Artificial Sequence
  Made in the lab
agtcaatacttccaaaggcttcctgat

SEQ ID NO: 3391 - DNA, 28 bp, Artificial Sequence
  Made in the lab
aagtcaatacttccaaaggcttcctgat

SEQ ID NO: 3392 - DNA, 29 bp, Artificial Sequence
  Made in the lab
aaagtcaatacttccaaaggcttcctgat

SEQ ID NO: 3393 - DNA, 30 bp, Artificial Sequence
  Made in the lab
caaagtcaatacttccaaaggcttcctgat

SEQ ID NO: 3394 - DNA, 21 bp, Artificial Sequence
  Made in the lab
gaagctgtcggaaatcatgga

SEQ ID NO: 3395 - DNA, 22 bp, Artificial Sequence
  Made in the lab
agaagctgtcggaaatcatgga

SEQ ID NO: 3396 - DNA, 23 bp, Artificial Sequence
  Made in the lab
aagaagctgtcggaaatcatgga

SEQ ID NO: 3397 - DNA, 24 bp, Artificial Sequence
  Made in the lab
caagaagctgtcggaaatcatgga

SEQ ID NO: 3398 - DNA, 25 bp, Artificial Sequence
  Made in the lab
gcaagaagctgtcggaaatcatgga

SEQ ID NO: 3399 - DNA, 26 bp, Artificial Sequence
  Made in the lab
ggcaagaagctgtcggaaatcatgga

SEQ ID NO: 3400 - DNA, 27 bp, Artificial Sequence
  Made in the lab
gggcaagaagctgtcggaaatcatgga

SEQ ID NO: 3401 - DNA, 28 bp, Artificial Sequence
  Made in the lab
ggggcaagaagctgtcggaaatcatgga

SEQ ID NO: 3402 - DNA, 29 bp, Artificial Sequence
  Made in the lab
aggggcaagaagctgtcggaaatcatgga

SEQ ID NO: 3403 - DNA, 30 bp, Artificial Sequence
  Made in the lab
caggggcaagaagctgtcggaaatcatgga

SEQ ID NO: 3404 - DNA, 21 bp, Artificial Sequence
  Made in the lab
ggagaagagtttgagcgacgg

SEQ ID NO: 3405 - DNA, 22 bp, Artificial Sequence
  Made in the lab
aggagaagagtttgagcgacgg

SEQ ID NO: 3406 - DNA, 23 bp, Artificial Sequence
  Made in the lab
aaggagaagagtttgagcgacgg

SEQ ID NO: 3407 - DNA, 24 bp, Artificial Sequence
  Made in the lab
caaggagaagagtttgagcgacgg

SEQ ID NO: 3408 - DNA, 25 bp, Artificial Sequence
  Made in the lab
gcaaggagaagagtttgagcgacgg

SEQ ID NO: 3409 - DNA, 26 bp, Artificial Sequence
  Made in the lab
agcaaggagaagagtttgagcgacgg

SEQ ID NO: 3410 - DNA, 27 bp, Artificial Sequence
  Made in the lab
cagcaaggagaagagtttgagcgacgg

SEQ ID NO: 3411 - DNA, 28 bp, Artificial Sequence
  Made in the lab
gcagcaaggagaagagtttgagcgacgg

SEQ ID NO: 3412 - DNA, 29 bp, Artificial Sequence
  Made in the lab
tgcagcaaggagaagagtttgagcgacgg

SEQ ID NO: 3413 - DNA, 30 bp, Artificial Sequence
  Made in the lab
gtgcagcaaggagaagagtttgagcgacgg

SEQ ID NO: 3414 - DNA, 21 bp, Artificial Sequence
  Made in the lab
ggccacagaacctgtcatcgc

SEQ ID NO: 3415 - DNA, 22 bp, Artificial Sequence
  Made in the lab
aggccacagaacctgtcatcgc

SEQ ID NO: 3416 - DNA, 23 bp, Artificial Sequence
  Made in the lab
aaggccacagaacctgtcatcgc

SEQ ID NO: 3417 - DNA, 24 bp, Artificial Sequence
  Made in the lab
caaggccacagaacctgtcatcgc

SEQ ID NO: 3418 - DNA, 25 bp, Artificial Sequence
  Made in the lab
acaaggccacagaacctgtcatcgc

SEQ ID NO: 3419 - DNA, 26 bp, Artificial Sequence
  Made in the lab
tacaaggccacagaacctgtcatcgc

SEQ ID NO: 3420 - DNA, 27 bp, Artificial Sequence
  Made in the lab
ttacaaggccacagaacctgtcatcgc

SEQ ID NO: 3421 - DNA, 28 bp, Artificial Sequence
  Made in the lab
attacaaggccacagaacctgtcatcgc

SEQ ID NO: 3422 - DNA, 29 bp, Artificial Sequence
  Made in the lab
tattacaaggccacagaacctgtcatcgc

SEQ ID NO: 3423 - DNA, 30 bp, Artificial Sequence
  Made in the lab
ctattacaaggccacagaacctgtcatcgc

SEQ ID NO: 3424 - DNA, 21 bp, Artificial Sequence
  Made in the lab
gcactaaaggaatttctaagg

SEQ ID NO: 3425 - DNA, 22 bp, Artificial Sequence
  Made in the lab
agcactaaaggaatttctaagg

SEQ ID NO: 3426 - DNA, 23 bp, Artificial Sequence
  Made in the lab
gagcactaaaggaatttctaagg

SEQ ID NO: 3427 - DNA, 24 bp, Artificial Sequence
  Made in the lab
tgagcactaaaggaatttctaagg

SEQ ID NO: 3428 - DNA, 25 bp, Artificial Sequence
  Made in the lab
ctgagcactaaaggaatttctaagg

SEQ ID NO: 3429 - DNA, 26 bp, Artificial Sequence
  Made in the lab
gctgagcactaaaggaatttctaagg

SEQ ID NO: 3430 - DNA, 27 bp, Artificial Sequence
  Made in the lab
agctgagcactaaaggaatttctaagg

SEQ ID NO: 3431 - DNA, 28 bp, Artificial Sequence
  Made in the lab
cagctgagcactaaaggaatttctaagg

SEQ ID NO: 3432 - DNA, 29 bp, Artificial Sequence
  Made in the lab
acagctgagcactaaaggaatttctaagg

SEQ ID NO: 3433 - DNA, 30 bp, Artificial Sequence
  Made in the lab
gacagctgagcactaaaggaatttctaagg

SEQ ID NO: 3434 - DNA, 21 bp, Artificial Sequence
  Made in the lab
gtcaatacttccaaaggcttc

SEQ ID NO: 3435 - DNA, 22 bp, Artificial Sequence
  Made in the lab
agtcaatacttccaaaggcttc

SEQ ID NO: 3436 - DNA, 23 bp, Artificial Sequence
  Made in the lab
aagtcaatacttccaaaggcttc

SEQ ID NO: 3437 - DNA, 24 bp, Artificial Sequence
  Made in the lab
aaagtcaatacttccaaaggcttc

SEQ ID NO: 3438 - DNA, 25 bp, Artificial Sequence
  Made in the lab
caaagtcaatacttccaaaggcttc

SEQ ID NO: 3439 - DNA, 26 bp, Artificial Sequence
  Made in the lab
ccaaagtcaatacttccaaaggcttc

SEQ ID NO: 3440 - DNA, 27 bp, Artificial Sequence
  Made in the lab
gccaaagtcaatacttccaaaggcttc

SEQ ID NO: 3441 - DNA, 28 bp, Artificial Sequence
  Made in the lab
ggccaaagtcaatacttccaaaggcttc

SEQ ID NO: 3442 - DNA, 29 bp, Artificial Sequence
  Made in the lab
tggccaaagtcaatacttccaaaggcttc

SEQ ID NO: 3443 - DNA, 30 bp, Artificial Sequence
  Made in the lab
gtggccaaagtcaatacttccaaaggcttc

SEQ ID NO: 3444 - DNA, 21 bp, Artificial Sequence
  Made in the lab
aggcttcctgattgatggcta

SEQ ID NO: 3445 - DNA, 22 bp, Artificial Sequence
  Made in the lab
aaggcttcctgattgatggcta

SEQ ID NO: 3446 - DNA, 23 bp, Artificial Sequence
  Made in the lab
aaaggcttcctgattgatggcta

SEQ ID NO: 3447 - DNA, 24 bp, Artificial Sequence
  Made in the lab
caaaggcttcctgattgatggcta

SEQ ID NO: 3448 - DNA, 25 bp, Artificial Sequence
  Made in the lab
ccaaaggcttcctgattgatggcta

SEQ ID NO: 3449 - DNA, 26 bp, Artificial Sequence
  Made in the lab
tccaaaggcttcctgattgatggcta

SEQ ID NO: 3450 - DNA, 27 bp, Artificial Sequence
  Made in the lab
ttccaaaggcttcctgattgatggcta

SEQ ID NO: 3451 - DNA, 28 bp, Artificial Sequence
  Made in the lab
cttccaaaggcttcctgattgatggcta

SEQ ID NO: 3452 - DNA, 29 bp, Artificial Sequence
  Made in the lab
acttccaaaggcttcctgattgatggcta

SEQ ID NO: 3453 - DNA, 30 bp, Artificial Sequence
  Made in the lab
tacttccaaaggcttcctgattgatggcta

SEQ ID NO: 3454 - DNA, 21 bp, Artificial Sequence
  Made in the lab
aaagcggctggagacctatta

SEQ ID NO: 3455 - DNA, 22 bp, Artificial Sequence
  Made in the lab
aaaagcggctggagacctatta

SEQ ID NO: 3456 - DNA, 23 bp, Artificial Sequence
  Made in the lab
aaaaagcggctggagacctatta

SEQ ID NO: 3457 - DNA, 24 bp, Artificial Sequence
  Made in the lab
caaaaagcggctggagacctatta

SEQ ID NO: 3458 - DNA, 25 bp, Artificial Sequence
  Made in the lab
tcaaaaagcggctggagacctatta

SEQ ID NO: 3459 - DNA, 26 bp, Artificial Sequence
  Made in the lab
atcaaaaagcggctggagacctatta

SEQ ID NO: 3460 - DNA, 27 bp, Artificial Sequence
  Made in the lab
catcaaaaagcggctggagacctatta

SEQ ID NO: 3461 - DNA, 28 bp, Artificial Sequence
  Made in the lab
ccatcaaaaagcggctggagacctatta

SEQ ID NO: 3462 - DNA, 29 bp, Artificial Sequence
  Made in the lab
accatcaaaaagcggctggagacctatta

SEQ ID NO: 3463 - DNA, 30 bp, Artificial Sequence
  Made in the lab
gaccatcaaaaagcggctggagacctatta

SEQ ID NO: 3464 - DNA, 21 bp, Artificial Sequence
  Made in the lab
caatgaggagaccatcaaaaa

SEQ ID NO: 3465 - DNA, 22 bp, Artificial Sequence
  Made in the lab
acaatgaggagaccatcaaaaa

SEQ ID NO: 3466 - DNA, 23 bp, Artificial Sequence
  Made in the lab
gacaatgaggagaccatcaaaaa

SEQ ID NO: 3467 - DNA, 24 bp, Artificial Sequence
  Made in the lab
cgacaatgaggagaccatcaaaaa

SEQ ID NO: 3468 - DNA, 25 bp, Artificial Sequence
  Made in the lab
acgacaatgaggagaccatcaaaaa

SEQ ID NO: 3469 - DNA, 26 bp, Artificial Sequence
  Made in the lab
gacgacaatgaggagaccatcaaaaa

SEQ ID NO: 3470 - DNA, 27 bp, Artificial Sequence
  Made in the lab
ggacgacaatgaggagaccatcaaaaa

SEQ ID NO: 3471 - DNA, 28 bp, Artificial Sequence
  Made in the lab
tggacgacaatgaggagaccatcaaaaa

SEQ ID NO: 3472 - DNA, 29 bp, Artificial Sequence
  Made in the lab
gtggacgacaatgaggagaccatcaaaaa

SEQ ID NO: 3473 - DNA, 30 bp, Artificial Sequence
  Made in the lab
tgtggacgacaatgaggagaccatcaaaaa

SEQ ID NO: 3474 - DNA, 21 bp, Artificial Sequence
  Made in the lab
aaaagcggctggagacctatt

SEQ ID NO: 3475 - DNA, 22 bp, Artificial Sequence
  Made in the lab
aaaaagcggctggagacctatt

SEQ ID NO: 3476 - DNA, 23 bp, Artificial Sequence
  Made in the lab
caaaaagcggctggagacctatt

SEQ ID NO: 3477 - DNA, 24 bp, Artificial Sequence
  Made in the lab
tcaaaaagcggctggagacctatt

SEQ ID NO: 3478 - DNA, 25 bp, Artificial Sequence
  Made in the lab
atcaaaaagcggctggagacctatt

SEQ ID NO: 3479 - DNA, 26 bp, Artificial Sequence
  Made in the lab
catcaaaaagcggctggagacctatt

SEQ ID NO: 3480 - DNA, 27 bp, Artificial Sequence
  Made in the lab
ccatcaaaaagcggctggagacctatt

SEQ ID NO: 3481 - DNA, 28 bp, Artificial Sequence
  Made in the lab
accatcaaaaagcggctggagacctatt

SEQ ID NO: 3482 - DNA, 29 bp, Artificial Sequence
  Made in the lab
gaccatcaaaaagcggctggagacctatt

SEQ ID NO: 3483 - DNA, 30 bp, Artificial Sequence
  Made in the lab
agaccatcaaaaagcggctggagacctatt

SEQ ID NO: 3484 - DNA, 21 bp, Artificial Sequence
  Made in the lab
gcgggcgtgtggacgacaatg

SEQ ID NO: 3485 - DNA, 22 bp, Artificial Sequence
  Made in the lab
agcgggcgtgtggacgacaatg

SEQ ID NO: 3486 - DNA, 23 bp, Artificial Sequence
  Made in the lab
cagcgggcgtgtggacgacaatg

SEQ ID NO: 3487 - DNA, 24 bp, Artificial Sequence
  Made in the lab
ccagcgggcgtgtggacgacaatg

SEQ ID NO: 3488 - DNA, 25 bp, Artificial Sequence
  Made in the lab
accagcgggcgtgtggacgacaatg

SEQ ID NO: 3489 - DNA, 26 bp, Artificial Sequence
  Made in the lab
gaccagcgggcgtgtggacgacaatg

SEQ ID NO: 3490 - DNA, 27 bp, Artificial Sequence
  Made in the lab
agaccagcgggcgtgtggacgacaatg

SEQ ID NO: 3491 - DNA, 28 bp, Artificial Sequence
  Made in the lab
gagaccagcgggcgtgtggacgacaatg

SEQ ID NO: 3492 - DNA, 29 bp, Artificial Sequence
  Made in the lab
agagaccagcgggcgtgtggacgacaatg

SEQ ID NO: 3493 - DNA, 30 bp, Artificial Sequence
  Made in the lab
gagagaccagcgggcgtgtggacgacaatg

SEQ ID NO: 3494 - DNA, 21 bp, Artificial Sequence
  Made in the lab
cagctgagcactaaaggaatt

SEQ ID NO: 3495 - DNA, 22 bp, Artificial Sequence
  Made in the lab
acagctgagcactaaaggaatt

SEQ ID NO: 3496 - DNA, 23 bp, Artificial Sequence
  Made in the lab
gacagctgagcactaaaggaatt

SEQ ID NO: 3497 - DNA, 24 bp, Artificial Sequence
  Made in the lab
ggacagctgagcactaaaggaatt

SEQ ID NO: 3498 - DNA, 25 bp, Artificial Sequence
  Made in the lab
tggacagctgagcactaaaggaatt

SEQ ID NO: 3499 - DNA, 26 bp, Artificial Sequence
  Made in the lab
atggacagctgagcactaaaggaatt

SEQ ID NO: 3500 - DNA, 27 bp, Artificial Sequence
  Made in the lab
catggacagctgagcactaaaggaatt

SEQ ID NO: 3501 - DNA, 28 bp, Artificial Sequence
  Made in the lab
tcatggacagctgagcactaaaggaatt

SEQ ID NO: 3502 - DNA, 29 bp, Artificial Sequence
  Made in the lab
ttcatggacagctgagcactaaaggaatt

SEQ ID NO: 3503 - DNA, 30 bp, Artificial Sequence
  Made in the lab
tttcatggacagctgagcactaaaggaatt

SEQ ID NO: 3504 - DNA, 21 bp, Artificial Sequence
  Made in the lab
gatggccttggccaatgaagg

SEQ ID NO: 3505 - DNA, 22 bp, Artificial Sequence
  Made in the lab
agatggccttggccaatgaagg

SEQ ID NO: 3506 - DNA, 23 bp, Artificial Sequence
  Made in the lab
aagatggccttggccaatgaagg

SEQ ID NO: 3507 - DNA, 24 bp, Artificial Sequence
  Made in the lab
caagatggccttggccaatgaagg

SEQ ID NO: 3508 - DNA, 25 bp, Artificial Sequence
  Made in the lab
ccaagatggccttggccaatgaagg

SEQ ID NO: 3509 - DNA, 26 bp, Artificial Sequence
  Made in the lab
cccaagatggccttggccaatgaagg

SEQ ID NO: 3510 - DNA, 27 bp, Artificial Sequence
  Made in the lab
acccaagatggccttggccaatgaagg

SEQ ID NO: 3511 - DNA, 28 bp, Artificial Sequence
  Made in the lab
gacccaagatggccttggccaatgaagg

SEQ ID NO: 3512 - DNA, 29 bp, Artificial Sequence
  Made in the lab
agacccaagatggccttggccaatgaagg

SEQ ID NO: 3513 - DNA, 30 bp, Artificial Sequence
  Made in the lab
cagacccaagatggccttggccaatgaagg

SEQ ID NO: 3514 - DNA, 21 bp, Artificial Sequence
  Made in the lab
gtcaacaggcagggtttttgc

SEQ ID NO: 3515 - DNA, 22 bp, Artificial Sequence
  Made in the lab
agtcaacaggcagggtttttgc

SEQ ID NO: 3516 - DNA, 23 bp, Artificial Sequence
  Made in the lab
aagtcaacaggcagggtttttgc

SEQ ID NO: 3517 - DNA, 24 bp, Artificial Sequence
  Made in the lab
gaagtcaacaggcagggtttttgc

SEQ ID NO: 3518 - DNA, 25 bp, Artificial Sequence
  Made in the lab
cgaagtcaacaggcagggtttttgc

SEQ ID NO: 3519 - DNA, 26 bp, Artificial Sequence
  Made in the lab
acgaagtcaacaggcagggtttttgc

SEQ ID NO: 3520 - DNA, 27 bp, Artificial Sequence
  Made in the lab
gacgaagtcaacaggcagggtttttgc

SEQ ID NO: 3521 - DNA, 28 bp, Artificial Sequence
  Made in the lab
agacgaagtcaacaggcagggtttttgc

SEQ ID NO: 3522 - DNA, 29 bp, Artificial Sequence
  Made in the lab
aagacgaagtcaacaggcagggtttttgc

SEQ ID NO: 3523 - DNA, 30 bp, Artificial Sequence
  Made in the lab
taagacgaagtcaacaggcagggtttttgc

SEQ ID NO: 3524 - DNA, 21 bp, Artificial Sequence
  Made in the lab
gccaccacatcagtctcaaca

SEQ ID NO: 3525 - DNA, 22 bp, Artificial Sequence
  Made in the lab
agccaccacatcagtctcaaca

SEQ ID NO: 3526 - DNA, 23 bp, Artificial Sequence
  Made in the lab
aagccaccacatcagtctcaaca

SEQ ID NO: 3527 - DNA, 24 bp, Artificial Sequence
  Made in the lab
gaagccaccacatcagtctcaaca

SEQ ID NO: 3528 - DNA, 25 bp, Artificial Sequence
  Made in the lab
ggaagccaccacatcagtctcaaca

SEQ ID NO: 3529 - DNA, 26 bp, Artificial Sequence
  Made in the lab
tggaagccaccacatcagtctcaaca

SEQ ID NO: 3530 - DNA, 27 bp, Artificial Sequence
  Made in the lab
ttggaagccaccacatcagtctcaaca

SEQ ID NO: 3531 - DNA, 28 bp, Artificial Sequence
  Made in the lab
attggaagccaccacatcagtctcaaca

SEQ ID NO: 3532 - DNA, 29 bp, Artificial Sequence
  Made in the lab
gattggaagccaccacatcagtctcaaca

SEQ ID NO: 3533 - DNA, 30 bp, Artificial Sequence
  Made in the lab
agattggaagccaccacatcagtctcaaca

SEQ ID NO: 3534 - DNA, 21 bp, Artificial Sequence
  Made in the lab
gggtaggagccctacactagg

SEQ ID NO: 3535 - DNA, 22 bp, Artificial Sequence
  Made in the lab
agggtaggagccctacactagg

SEQ ID NO: 3536 - DNA, 23 bp, Artificial Sequence
  Made in the lab
aagggtaggagccctacactagg

SEQ ID NO: 3537 - DNA, 24 bp, Artificial Sequence
  Made in the lab
caagggtaggagccctacactagg

SEQ ID NO: 3538 - DNA, 25 bp, Artificial Sequence
  Made in the lab
ccaagggtaggagccctacactagg

SEQ ID NO: 3539 - DNA, 26 bp, Artificial Sequence
  Made in the lab
gccaagggtaggagccctacactagg

SEQ ID NO: 3540 - DNA, 27 bp, Artificial Sequence
  Made in the lab
agccaagggtaggagccctacactagg

SEQ ID NO: 3541 - DNA, 28 bp, Artificial Sequence
  Made in the lab
gagccaagggtaggagccctacactagg

SEQ ID NO: 3542 - DNA, 29 bp, Artificial Sequence
  Made in the lab
ggagccaagggtaggagccctacactagg

SEQ ID NO: 3543 - DNA, 30 bp, Artificial Sequence
  Made in the lab
tggagccaagggtaggagccctacactagg

SEQ ID NO: 3544 - DNA, 21 bp, Artificial Sequence
  Made in the lab
ctaccgcgagctgcgctggtt

SEQ ID NO: 3545 - DNA, 22 bp, Artificial Sequence
  Made in the lab
actaccgcgagctgcgctggtt

SEQ ID NO: 3546 - DNA, 23 bp, Artificial Sequence
  Made in the lab
aactaccgcgagctgcgctggtt

SEQ ID NO: 3547 - DNA, 24 bp, Artificial Sequence
  Made in the lab
caactaccgcgagctgcgctggtt

SEQ ID NO: 3548 - DNA, 25 bp, Artificial Sequence
  Made in the lab
gcaactaccgcgagctgcgctggtt

SEQ ID NO: 3549 - DNA, 26 bp, Artificial Sequence
  Made in the lab
ggcaactaccgcgagctgcgctggtt

SEQ ID NO: 3550 - DNA, 27 bp, Artificial Sequence
  Made in the lab
aggcaactaccgcgagctgcgctggtt

SEQ ID NO: 3551 - DNA, 28 bp, Artificial Sequence
  Made in the lab
aaggcaactaccgcgagctgcgctggtt

SEQ ID NO: 3552 - DNA, 29 bp, Artificial Sequence
  Made in the lab
gaaggcaactaccgcgagctgcgctggtt

SEQ ID NO: 3553 - DNA, 30 bp, Artificial Sequence
  Made in the lab
tgaaggcaactaccgcgagctgcgctggtt

SEQ ID NO: 3554 - DNA, 21 bp, Artificial Sequence
  Made in the lab
cggatgttgggatcattatta

SEQ ID NO: 3555 - DNA, 22 bp, Artificial Sequence
  Made in the lab
acggatgttgggatcattatta

SEQ ID NO: 3556 - DNA, 23 bp, Artificial Sequence
  Made in the lab
tacggatgttgggatcattatta

SEQ ID NO: 3557 - DNA, 24 bp, Artificial Sequence
  Made in the lab
ctacggatgttgggatcattatta

SEQ ID NO: 3558 - DNA, 25 bp, Artificial Sequence
  Made in the lab
gctacggatgttgggatcattatta

SEQ ID NO: 3559 - DNA, 26 bp, Artificial Sequence
  Made in the lab
ggctacggatgttgggatcattatta

SEQ ID NO: 3560 - DNA, 27 bp, Artificial Sequence
  Made in the lab
cggctacggatgttgggatcattatta

SEQ ID NO: 3561 - DNA, 28 bp, Artificial Sequence
  Made in the lab
gcggctacggatgttgggatcattatta

SEQ ID NO: 3562 - DNA, 29 bp, Artificial Sequence
  Made in the lab
tgcggctacggatgttgggatcattatta

SEQ ID NO: 3563 - DNA, 30 bp, Artificial Sequence
  Made in the lab
atgcggctacggatgttgggatcattatta

SEQ ID NO: 3564 - DNA, 21 bp, Artificial Sequence
  Made in the lab
gcaagaacggtgggatttact

SEQ ID NO: 3565 - DNA, 22 bp, Artificial Sequence
  Made in the lab
agcaagaacggtgggatttact

SEQ ID NO: 3566 - DNA, 23 bp, Artificial Sequence
  Made in the lab
cagcaagaacggtgggatttact

SEQ ID NO: 3567 - DNA, 24 bp, Artificial Sequence
  Made in the lab
ccagcaagaacggtgggatttact

SEQ ID NO: 3568 - DNA, 25 bp, Artificial Sequence
  Made in the lab
accagcaagaacggtgggatttact

SEQ ID NO: 3569 - DNA, 26 bp, Artificial Sequence
  Made in the lab
caccagcaagaacggtgggatttact

SEQ ID NO: 3570 - DNA, 27 bp, Artificial Sequence
  Made in the lab
tcaccagcaagaacggtgggatttact

SEQ ID NO: 3571 - DNA, 28 bp, Artificial Sequence
  Made in the lab
gtcaccagcaagaacggtgggatttact

SEQ ID NO: 3572 - DNA, 29 bp, Artificial Sequence
  Made in the lab
ggtcaccagcaagaacggtgggatttact

SEQ ID NO: 3573 - DNA, 30 bp, Artificial Sequence
  Made in the lab
tggtcaccagcaagaacggtgggatttact

SEQ ID NO: 3574 - DNA, 21 bp, Artificial Sequence
  Made in the lab
gcggtttttctccaagtactc

SEQ ID NO: 3575 - DNA, 22 bp, Artificial Sequence
  Made in the lab
agcggtttttctccaagtactc

SEQ ID NO: 3576 - DNA, 23 bp, Artificial Sequence
  Made in the lab
aagcggtttttctccaagtactc

SEQ ID NO: 3577 - DNA, 24 bp, Artificial Sequence
  Made in the lab
gaagcggtttttctccaagtactc

SEQ ID NO: 3578 - DNA, 25 bp, Artificial Sequence
  Made in the lab
tgaagcggtttttctccaagtactc

SEQ ID NO: 3579 - DNA, 26 bp, Artificial Sequence
  Made in the lab
gtgaagcggtttttctccaagtactc

SEQ ID NO: 3580 - DNA, 27 bp, Artificial Sequence
  Made in the lab
agtgaagcggtttttctccaagtactc

SEQ ID NO: 3581 - DNA, 28 bp, Artificial Sequence
  Made in the lab
aagtgaagcggtttttctccaagtactc

SEQ ID NO: 3582 - DNA, 29 bp, Artificial Sequence
  Made in the lab
aaagtgaagcggtttttctccaagtactc

SEQ ID NO: 3583 - DNA, 30 bp, Artificial Sequence
  Made in the lab
caaagtgaagcggtttttctccaagtactc

SEQ ID NO: 3584 - DNA, 21 bp, Artificial Sequence
  Made in the lab
acagaggagcaagatacaggc

SEQ ID NO: 3585 - DNA, 22 bp, Artificial Sequence
  Made in the lab
aacagaggagcaagatacaggc

SEQ ID NO: 3586 - DNA, 23 bp, Artificial Sequence
  Made in the lab
aaacagaggagcaagatacaggc

SEQ ID NO: 3587 - DNA, 24 bp, Artificial Sequence
  Made in the lab
aaaacagaggagcaagatacaggc

SEQ ID NO: 3588 - DNA, 25 bp, Artificial Sequence
  Made in the lab
aaaaacagaggagcaagatacaggc

SEQ ID NO: 3589 - DNA, 26 bp, Artificial Sequence
  Made in the lab
caaaaacagaggagcaagatacaggc

SEQ ID NO: 3590 - DNA, 27 bp, Artificial Sequence
  Made in the lab
ccaaaaacagaggagcaagatacaggc

SEQ ID NO: 3591 - DNA, 28 bp, Artificial Sequence
  Made in the lab
gccaaaaacagaggagcaagatacaggc

SEQ ID NO: 3592 - DNA, 29 bp, Artificial Sequence
  Made in the lab
tgccaaaaacagaggagcaagatacaggc

SEQ ID NO: 3593 - DNA, 30 bp, Artificial Sequence
  Made in the lab
ttgccaaaaacagaggagcaagatacaggc

SEQ ID NO: 3594 - DNA, 21 bp, Artificial Sequence
  Made in the lab
caggaagatcctgctcatcag

SEQ ID NO: 3595 - DNA, 22 bp, Artificial Sequence
  Made in the lab
acaggaagatcctgctcatcag

SEQ ID NO: 3596 - DNA, 23 bp, Artificial Sequence
  Made in the lab
aacaggaagatcctgctcatcag

SEQ ID NO: 3597 - DNA, 24 bp, Artificial Sequence
  Made in the lab
caacaggaagatcctgctcatcag

SEQ ID NO: 3598 - DNA, 25 bp, Artificial Sequence
  Made in the lab
tcaacaggaagatcctgctcatcag

SEQ ID NO: 3599 - DNA, 26 bp, Artificial Sequence
  Made in the lab
ctcaacaggaagatcctgctcatcag

SEQ ID NO: 3600 - DNA, 27 bp, Artificial Sequence
  Made in the lab
cctcaacaggaagatcctgctcatcag

SEQ ID NO: 3601 - DNA, 28 bp, Artificial Sequence
  Made in the lab
tcctcaacaggaagatcctgctcatcag

SEQ ID NO: 3602 - DNA, 29 bp, Artificial Sequence
  Made in the lab
ttcctcaacaggaagatcctgctcatcag

SEQ ID NO: 3603 - DNA, 30 bp, Artificial Sequence
  Made in the lab
attcctcaacaggaagatcctgctcatcag

SEQ ID NO: 3604 - DNA, 21 bp, Artificial Sequence
  Made in the lab
gtgagatctgtgaggagctct

SEQ ID NO: 3605 - DNA, 22 bp, Artificial Sequence
  Made in the lab
agtgagatctgtgaggagctct

SEQ ID NO: 3606 - DNA, 23 bp, Artificial Sequence
  Made in the lab
aagtgagatctgtgaggagctct

SEQ ID NO: 3607 - DNA, 24 bp, Artificial Sequence
  Made in the lab
gaagtgagatctgtgaggagctct

SEQ ID NO: 3608 - DNA, 25 bp, Artificial Sequence
  Made in the lab
ggaagtgagatctgtgaggagctct

SEQ ID NO: 3609 - DNA, 26 bp, Artificial Sequence
  Made in the lab
tggaagtgagatctgtgaggagctct

SEQ ID NO: 3610 - DNA, 27 bp, Artificial Sequence
  Made in the lab
ttggaagtgagatctgtgaggagctct

SEQ ID NO: 3611 - DNA, 28 bp, Artificial Sequence
  Made in the lab
attggaagtgagatctgtgaggagctct

SEQ ID NO: 3612 - DNA, 29 bp, Artificial Sequence
  Made in the lab
cattggaagtgagatctgtgaggagctct

SEQ ID NO: 3613 - DNA, 30 bp, Artificial Sequence
  Made in the lab
gcattggaagtgagatctgtgaggagctct

SEQ ID NO: 3614 - DNA, 21 bp, Artificial Sequence
  Made in the lab
atgaggaagtgctggctgatg

SEQ ID NO: 3615 - DNA, 22 bp, Artificial Sequence
  Made in the lab
aatgaggaagtgctggctgatg

SEQ ID NO: 3616 - DNA, 23 bp, Artificial Sequence
  Made in the lab
aaatgaggaagtgctggctgatg

SEQ ID NO: 3617 - DNA, 24 bp, Artificial Sequence
  Made in the lab
gaaatgaggaagtgctggctgatg

SEQ ID NO: 3618 - DNA, 25 bp, Artificial Sequence
  Made in the lab
ggaaatgaggaagtgctggctgatg

SEQ ID NO: 3619 - DNA, 26 bp, Artificial Sequence
  Made in the lab
tggaaatgaggaagtgctggctgatg

SEQ ID NO: 3620 - DNA, 27 bp, Artificial Sequence
  Made in the lab
gtggaaatgaggaagtgctggctgatg

SEQ ID NO: 3621 - DNA, 28 bp, Artificial Sequence
  Made in the lab
agtggaaatgaggaagtgctggctgatg

SEQ ID NO: 3622 - DNA, 29 bp, Artificial Sequence
  Made in the lab
gagtggaaatgaggaagtgctggctgatg

SEQ ID NO: 3623 - DNA, 30 bp, Artificial Sequence
  Made in the lab
ggagtggaaatgaggaagtgctggctgatg

SEQ ID NO: 3624 - DNA, 21 bp, Artificial Sequence
  Made in the lab
cagacacaagatgaccacgct

SEQ ID NO: 3625 - DNA, 22 bp, Artificial Sequence
  Made in the lab
acagacacaagatgaccacgct

SEQ ID NO: 3626 - DNA, 23 bp, Artificial Sequence
  Made in the lab
aacagacacaagatgaccacgct

SEQ ID NO: 3627 - DNA, 24 bp, Artificial Sequence
  Made in the lab
gaacagacacaagatgaccacgct

SEQ ID NO: 3628 - DNA, 25 bp, Artificial Sequence
  Made in the lab
tgaacagacacaagatgaccacgct

SEQ ID NO: 3629 - DNA, 26 bp, Artificial Sequence
  Made in the lab
atgaacagacacaagatgaccacgct

SEQ ID NO: 3630 - DNA, 27 bp, Artificial Sequence
  Made in the lab
catgaacagacacaagatgaccacgct

SEQ ID NO: 3631 - DNA, 28 bp, Artificial Sequence
  Made in the lab
ccatgaacagacacaagatgaccacgct

SEQ ID NO: 3632 - DNA, 29 bp, Artificial Sequence
  Made in the lab
tccatgaacagacacaagatgaccacgct

SEQ ID NO: 3633 - DNA, 30 bp, Artificial Sequence
  Made in the lab
ctccatgaacagacacaagatgaccacgct

SEQ ID NO: 3634 - DNA, 21 bp, Artificial Sequence
  Made in the lab
agccaacaccagggtggatct

SEQ ID NO: 3635 - DNA, 22 bp, Artificial Sequence
  Made in the lab
aagccaacaccagggtggatct

SEQ ID NO: 3636 - DNA, 23 bp, Artificial Sequence
  Made in the lab
aaagccaacaccagggtggatct

SEQ ID NO: 3637 - DNA, 24 bp, Artificial Sequence
  Made in the lab
caaagccaacaccagggtggatct

SEQ ID NO: 3638 - DNA, 25 bp, Artificial Sequence
  Made in the lab
gcaaagccaacaccagggtggatct

SEQ ID NO: 3639 - DNA, 26 bp, Artificial Sequence
  Made in the lab
cgcaaagccaacaccagggtggatct

SEQ ID NO: 3640 - DNA, 27 bp, Artificial Sequence
  Made in the lab
gcgcaaagccaacaccagggtggatct

SEQ ID NO: 3641 - DNA, 28 bp, Artificial Sequence
  Made in the lab
tgcgcaaagccaacaccagggtggatct

SEQ ID NO: 3642 - DNA, 29 bp, Artificial Sequence
  Made in the lab
ctgcgcaaagccaacaccagggtggatct

SEQ ID NO: 3643 - DNA, 30 bp, Artificial Sequence
  Made in the lab
gctgcgcaaagccaacaccagggtggatct

SEQ ID NO: 3644 - DNA, 21 bp, Artificial Sequence
  Made in the lab
cggaagcgtctttgctcaagg

SEQ ID NO: 3645 - DNA, 22 bp, Artificial Sequence
  Made in the lab
acggaagcgtctttgctcaagg

SEQ ID NO: 3646 - DNA, 23 bp, Artificial Sequence
  Made in the lab
aacggaagcgtctttgctcaagg

SEQ ID NO: 3647 - DNA, 24 bp, Artificial Sequence
  Made in the lab
gaacggaagcgtctttgctcaagg

SEQ ID NO: 3648 - DNA, 25 bp, Artificial Sequence
  Made in the lab
tgaacggaagcgtctttgctcaagg

SEQ ID NO: 3649 - DNA, 26 bp, Artificial Sequence
  Made in the lab
atgaacggaagcgtctttgctcaagg

SEQ ID NO: 3650 - DNA, 27 bp, Artificial Sequence
  Made in the lab
catgaacggaagcgtctttgctcaagg

SEQ ID NO: 3651 - DNA, 28 bp, Artificial Sequence
  Made in the lab
ccatgaacggaagcgtctttgctcaagg

SEQ ID NO: 3652 - DNA, 29 bp, Artificial Sequence
  Made in the lab
gccatgaacggaagcgtctttgctcaagg

SEQ ID NO: 3653 - DNA, 30 bp, Artificial Sequence
  Made in the lab
tgccatgaacggaagcgtctttgctcaagg

SEQ ID NO: 3654 - DNA, 21 bp, Artificial Sequence
  Made in the lab
tacggatggtcctcgcctatc

SEQ ID NO: 3655 - DNA, 22 bp, Artificial Sequence
  Made in the lab
atacggatggtcctcgcctatc

SEQ ID NO: 3656 - DNA, 23 bp, Artificial Sequence
  Made in the lab
aatacggatggtcctcgcctatc

SEQ ID NO: 3657 - DNA, 24 bp, Artificial Sequence
  Made in the lab
gaatacggatggtcctcgcctatc

SEQ ID NO: 3658 - DNA, 25 bp, Artificial Sequence
  Made in the lab
cgaatacggatggtcctcgcctatc

SEQ ID NO: 3659 - DNA, 26 bp, Artificial Sequence
  Made in the lab
tcgaatacggatggtcctcgcctatc

SEQ ID NO: 3660 - DNA, 27 bp, Artificial Sequence
  Made in the lab
ctcgaatacggatggtcctcgcctatc

SEQ ID NO: 3661 - DNA, 28 bp, Artificial Sequence
  Made in the lab
gctcgaatacggatggtcctcgcctatc

SEQ ID NO: 3662 - DNA, 29 bp, Artificial Sequence
  Made in the lab
ggctcgaatacggatggtcctcgcctatc

SEQ ID NO: 3663 - DNA, 30 bp, Artificial Sequence
  Made in the lab
aggctcgaatacggatggtcctcgcctatc

SEQ ID NO: 3664 - DNA, 21 bp, Artificial Sequence
  Made in the lab
ctcaggaaggtggccaagatg

SEQ ID NO: 3665 - DNA, 22 bp, Artificial Sequence
  Made in the lab
actcaggaaggtggccaagatg

SEQ ID NO: 3666 - DNA, 23 bp, Artificial Sequence
  Made in the lab
aactcaggaaggtggccaagatg

SEQ ID NO: 3667 - DNA, 24 bp, Artificial Sequence
  Made in the lab
aaactcaggaaggtggccaagatg

SEQ ID NO: 3668 - DNA, 25 bp, Artificial Sequence
  Made in the lab
gaaactcaggaaggtggccaagatg

SEQ ID NO: 3669 - DNA, 26 bp, Artificial Sequence
  Made in the lab
ggaaactcaggaaggtggccaagatg

SEQ ID NO: 3670 - DNA, 27 bp, Artificial Sequence
  Made in the lab
gggaaactcaggaaggtggccaagatg

SEQ ID NO: 3671 - DNA, 28 bp, Artificial Sequence
  Made in the lab
tgggaaactcaggaaggtggccaagatg

SEQ ID NO: 3672 - DNA, 29 bp, Artificial Sequence
  Made in the lab
atgggaaactcaggaaggtggccaagatg

SEQ ID NO: 3673 - DNA, 30 bp, Artificial Sequence
  Made in the lab
tatgggaaactcaggaaggtggccaagatg

SEQ ID NO: 3674 - DNA, 21 bp, Artificial Sequence
  Made in the lab
ggtggactttgccctctcgtg

SEQ ID NO: 3675 - DNA, 22 bp, Artificial Sequence
  Made in the lab
aggtggactttgccctctcgtg

SEQ ID NO: 3676 - DNA, 23 bp, Artificial Sequence
  Made in the lab
aaggtggactttgccctctcgtg

SEQ ID NO: 3677 - DNA, 24 bp, Artificial Sequence
  Made in the lab
gaaggtggactttgccctctcgtg

SEQ ID NO: 3678 - DNA, 25 bp, Artificial Sequence
  Made in the lab
tgaaggtggactttgccctctcgtg

SEQ ID NO: 3679 - DNA, 26 bp, Artificial Sequence
  Made in the lab
gtgaaggtggactttgccctctcgtg

SEQ ID NO: 3680 - DNA, 27 bp, Artificial Sequence
  Made in the lab
agtgaaggtggactttgccctctcgtg

SEQ ID NO: 3681 - DNA, 28 bp, Artificial Sequence
  Made in the lab
gagtgaaggtggactttgccctctcgtg

SEQ ID NO: 3682 - DNA, 29 bp, Artificial Sequence
  Made in the lab
agagtgaaggtggactttgccctctcgtg

SEQ ID NO: 3683 - DNA, 30 bp, Artificial Sequence
  Made in the lab
cagagtgaaggtggactttgccctctcgtg

SEQ ID NO: 3684 - DNA, 21 bp, Artificial Sequence
  Made in the lab
gtacgactgctccagtgcgga

SEQ ID NO: 3685 - DNA, 22 bp, Artificial Sequence
  Made in the lab
agtacgactgctccagtgcgga

SEQ ID NO: 3686 - DNA, 23 bp, Artificial Sequence
  Made in the lab
aagtacgactgctccagtgcgga

SEQ ID NO: 3687 - DNA, 24 bp, Artificial Sequence
  Made in the lab
caagtacgactgctccagtgcgga

SEQ ID NO: 3688 - DNA, 25 bp, Artificial Sequence
  Made in the lab
ccaagtacgactgctccagtgcgga

SEQ ID NO: 3689 - DNA, 26 bp, Artificial Sequence
  Made in the lab
accaagtacgactgctccagtgcgga

SEQ ID NO: 3690 - DNA, 27 bp, Artificial Sequence
  Made in the lab
gaccaagtacgactgctccagtgcgga

SEQ ID NO: 3691 - DNA, 28 bp, Artificial Sequence
  Made in the lab
tgaccaagtacgactgctccagtgcgga

SEQ ID NO: 3692 - DNA, 29 bp, Artificial Sequence
  Made in the lab
ctgaccaagtacgactgctccagtgcgga

SEQ ID NO: 3693 - DNA, 30 bp, Artificial Sequence
  Made in the lab
cctgaccaagtacgactgctccagtgcgga

SEQ ID NO: 3694 - DNA, 21 bp, Artificial Sequence
  Made in the lab
gggcaatttgcaaagaatttt

SEQ ID NO: 3695 - DNA, 22 bp, Artificial Sequence
  Made in the lab
agggcaatttgcaaagaatttt

SEQ ID NO: 3696 - DNA, 23 bp, Artificial Sequence
  Made in the lab
gagggcaatttgcaaagaatttt

SEQ ID NO: 3697 - DNA, 24 bp, Artificial Sequence
  Made in the lab
cgagggcaatttgcaaagaatttt

SEQ ID NO: 3698 - DNA, 25 bp, Artificial Sequence
  Made in the lab
tcgagggcaatttgcaaagaatttt

SEQ ID NO: 3699 - DNA, 26 bp, Artificial Sequence
  Made in the lab
ttcgagggcaatttgcaaagaatttt

SEQ ID NO: 3700 - DNA, 27 bp, Artificial Sequence
  Made in the lab
cttcgagggcaatttgcaaagaatttt

SEQ ID NO: 3701 - DNA, 28 bp, Artificial Sequence
  Made in the lab
acttcgagggcaatttgcaaagaatttt

SEQ ID NO: 3702 - DNA, 29 bp, Artificial Sequence
  Made in the lab
gacttcgagggcaatttgcaaagaatttt

SEQ ID NO: 3703 - DNA, 30 bp, Artificial Sequence
  Made in the lab
ggacttcgagggcaatttgcaaagaatttt

SEQ ID NO: 3704 - DNA, 21 bp, Artificial Sequence
  Made in the lab
gggaacttttcagtcaaattc

SEQ ID NO: 3705 - DNA, 22 bp, Artificial Sequence
  Made in the lab
agggaacttttcagtcaaattc

SEQ ID NO: 3706 - DNA, 23 bp, Artificial Sequence
  Made in the lab
gagggaacttttcagtcaaattc

SEQ ID NO: 3707 - DNA, 24 bp, Artificial Sequence
  Made in the lab
ggagggaacttttcagtcaaattc

SEQ ID NO: 3708 - DNA, 25 bp, Artificial Sequence
  Made in the lab
gggagggaacttttcagtcaaattc

SEQ ID NO: 3709 - DNA, 26 bp, Artificial Sequence
  Made in the lab
agggagggaacttttcagtcaaattc

SEQ ID NO: 3710 - DNA, 27 bp, Artificial Sequence
  Made in the lab
gagggagggaacttttcagtcaaattc

SEQ ID NO: 3711 - DNA, 28 bp, Artificial Sequence
  Made in the lab
agagggagggaacttttcagtcaaattc

SEQ ID NO: 3712 - DNA, 29 bp, Artificial Sequence
  Made in the lab
gagagggagggaacttttcagtcaaattc

SEQ ID NO: 3713 - DNA, 30 bp, Artificial Sequence
  Made in the lab
cgagagggagggaacttttcagtcaaattc

SEQ ID NO: 3714 - DNA, 21 bp, Artificial Sequence
  Made in the lab
ccatttctgtacaacacaagc

SEQ ID NO: 3715 - DNA, 22 bp, Artificial Sequence
  Made in the lab
accatttctgtacaacacaagc

SEQ ID NO: 3716 - DNA, 23 bp, Artificial Sequence
  Made in the lab
gaccatttctgtacaacacaagc

SEQ ID NO: 3717 - DNA, 24 bp, Artificial Sequence
  Made in the lab
cgaccatttctgtacaacacaagc

SEQ ID NO: 3718 - DNA, 25 bp, Artificial Sequence
  Made in the lab
gcgaccatttctgtacaacacaagc

SEQ ID NO: 3719 - DNA, 26 bp, Artificial Sequence
  Made in the lab
tgcgaccatttctgtacaacacaagc

SEQ ID NO: 3720 - DNA, 27 bp, Artificial Sequence
  Made in the lab
ctgcgaccatttctgtacaacacaagc

SEQ ID NO: 3721 - DNA, 28 bp, Artificial Sequence
  Made in the lab
tctgcgaccatttctgtacaacacaagc

SEQ ID NO: 3722 - DNA, 29 bp, Artificial Sequence
  Made in the lab
atctgcgaccatttctgtacaacacaagc

SEQ ID NO: 3723 - DNA, 30 bp, Artificial Sequence
  Made in the lab
gatctgcgaccatttctgtacaacacaagc

SEQ ID NO: 3724 - DNA, 21 bp, Artificial Sequence
  Made in the lab
cgacggctgtgccatgattgc

SEQ ID NO: 3725 - DNA, 22 bp, Artificial Sequence
  Made in the lab
acgacggctgtgccatgattgc

SEQ ID NO: 3726 - DNA, 23 bp, Artificial Sequence
  Made in the lab
tacgacggctgtgccatgattgc

SEQ ID NO: 3727 - DNA, 24 bp, Artificial Sequence
  Made in the lab
ctacgacggctgtgccatgattgc

SEQ ID NO: 3728 - DNA, 25 bp, Artificial Sequence
  Made in the lab
actacgacggctgtgccatgattgc

SEQ ID NO: 3729 - DNA, 26 bp, Artificial Sequence
  Made in the lab
tactacgacggctgtgccatgattgc

SEQ ID NO: 3730 - DNA, 27 bp, Artificial Sequence
  Made in the lab
gtactacgacggctgtgccatgattgc

SEQ ID NO: 3731 - DNA, 28 bp, Artificial Sequence
  Made in the lab
tgtactacgacggctgtgccatgattgc

SEQ ID NO: 3732 - DNA, 29 bp, Artificial Sequence
  Made in the lab
ctgtactacgacggctgtgccatgattgc

SEQ ID NO: 3733 - DNA, 30 bp, Artificial Sequence
  Made in the lab
cctgtactacgacggctgtgccatgattgc

SEQ ID NO: 3734 - DNA, 21 bp, Artificial Sequence
  Made in the lab
ggctgggagaagctatcattg

SEQ ID NO: 3735 - DNA, 22 bp, Artificial Sequence
  Made in the lab
aggctgggagaagctatcattg

SEQ ID NO: 3736 - DNA, 23 bp, Artificial Sequence
  Made in the lab
aaggctgggagaagctatcattg

SEQ ID NO: 3737 - DNA, 24 bp, Artificial Sequence
  Made in the lab
gaaggctgggagaagctatcattg

SEQ ID NO: 3738 - DNA, 25 bp, Artificial Sequence
  Made in the lab
ggaaggctgggagaagctatcattg

SEQ ID NO: 3739 - DNA, 26 bp, Artificial Sequence
  Made in the lab
gggaaggctgggagaagctatcattg

SEQ ID NO: 3740 - DNA, 27 bp, Artificial Sequence
  Made in the lab
ggggaaggctgggagaagctatcattg

SEQ ID NO: 3741 - DNA, 28 bp, Artificial Sequence
  Made in the lab
aggggaaggctgggagaagctatcattg

SEQ ID NO: 3742 - DNA, 29 bp, Artificial Sequence
  Made in the lab
gaggggaaggctgggagaagctatcattg

SEQ ID NO: 3743 - DNA, 30 bp, Artificial Sequence
  Made in the lab
ggaggggaaggctgggagaagctatcattg

SEQ ID NO: 3744 - DNA, 21 bp, Artificial Sequence
  Made in the lab
ggcaggaccatgacatctagg

SEQ ID NO: 3745 - DNA, 22 bp, Artificial Sequence
  Made in the lab
aggcaggaccatgacatctagg

SEQ ID NO: 3746 - DNA, 23 bp, Artificial Sequence
  Made in the lab
aaggcaggaccatgacatctagg

SEQ ID NO: 3747 - DNA, 24 bp, Artificial Sequence
  Made in the lab
gaaggcaggaccatgacatctagg

SEQ ID NO: 3748 - DNA, 25 bp, Artificial Sequence
  Made in the lab
agaaggcaggaccatgacatctagg

SEQ ID NO: 3749 - DNA, 26 bp, Artificial Sequence
  Made in the lab
gagaaggcaggaccatgacatctagg

SEQ ID NO: 3750 - DNA, 27 bp, Artificial Sequence
  Made in the lab
agagaaggcaggaccatgacatctagg

SEQ ID NO: 3751 - DNA, 28 bp, Artificial Sequence
  Made in the lab
cagagaaggcaggaccatgacatctagg

SEQ ID NO: 3752 - DNA, 29 bp, Artificial Sequence
  Made in the lab
gcagagaaggcaggaccatgacatctagg

SEQ ID NO: 3753 - DNA, 30 bp, Artificial Sequence
  Made in the lab
ggcagagaaggcaggaccatgacatctagg

SEQ ID NO: 3754 - DNA, 21 bp, Artificial Sequence
  Made in the lab
gaggtataatctgcagatgtt

SEQ ID NO: 3755 - DNA, 22 bp, Artificial Sequence
  Made in the lab
agaggtataatctgcagatgtt

SEQ ID NO: 3756 - DNA, 23 bp, Artificial Sequence
  Made in the lab
aagaggtataatctgcagatgtt

SEQ ID NO: 3757 - DNA, 24 bp, Artificial Sequence
  Made in the lab
caagaggtataatctgcagatgtt

SEQ ID NO: 3758 - DNA, 25 bp, Artificial Sequence
  Made in the lab
tcaagaggtataatctgcagatgtt

SEQ ID NO: 3759 - DNA, 26 bp, Artificial Sequence
  Made in the lab
atcaagaggtataatctgcagatgtt

SEQ ID NO: 3760 - DNA, 27 bp, Artificial Sequence
  Made in the lab
tatcaagaggtataatctgcagatgtt

SEQ ID NO: 3761 - DNA, 28 bp, Artificial Sequence
  Made in the lab
ctatcaagaggtataatctgcagatgtt

SEQ ID NO: 3762 - DNA, 29 bp, Artificial Sequence
  Made in the lab
actatcaagaggtataatctgcagatgtt

SEQ ID NO: 3763 - DNA, 30 bp, Artificial Sequence
  Made in the lab
cactatcaagaggtataatctgcagatgtt

SEQ ID NO: 3764 - DNA, 21 bp, Artificial Sequence
  Made in the lab
gtagaaagagacgggattttg

SEQ ID NO: 3765 - DNA, 22 bp, Artificial Sequence
  Made in the lab
agtagaaagagacgggattttg

SEQ ID NO: 3766 - DNA, 23 bp, Artificial Sequence
  Made in the lab
aagtagaaagagacgggattttg

SEQ ID NO: 3767 - DNA, 24 bp, Artificial Sequence
  Made in the lab
gaagtagaaagagacgggattttg

SEQ ID NO: 3768 - DNA, 25 bp, Artificial Sequence
  Made in the lab
tgaagtagaaagagacgggattttg

SEQ ID NO: 3769 - DNA, 26 bp, Artificial Sequence
  Made in the lab
ctgaagtagaaagagacgggattttg

SEQ ID NO: 3770 - DNA, 27 bp, Artificial Sequence
  Made in the lab
cctgaagtagaaagagacgggattttg

SEQ ID NO: 3771 - DNA, 28 bp, Artificial Sequence
  Made in the lab
gcctgaagtagaaagagacgggattttg

SEQ ID NO: 3772 - DNA, 29 bp, Artificial Sequence
  Made in the lab
agcctgaagtagaaagagacgggattttg

SEQ ID NO: 3773 - DNA, 30 bp, Artificial Sequence
  Made in the lab
aagcctgaagtagaaagagacgggattttg

SEQ ID NO: 3774 - DNA, 21 bp, Artificial Sequence
  Made in the lab
cagtttctacaggacactatc

SEQ ID NO: 3775 - DNA, 22 bp, Artificial Sequence
  Made in the lab
acagtttctacaggacactatc

SEQ ID NO: 3776 - DNA, 23 bp, Artificial Sequence
  Made in the lab
aacagtttctacaggacactatc

SEQ ID NO: 3777 - DNA, 24 bp, Artificial Sequence
  Made in the lab
gaacagtttctacaggacactatc

SEQ ID NO: 3778 - DNA, 25 bp, Artificial Sequence
  Made in the lab
ggaacagtttctacaggacactatc

SEQ ID NO: 3779 - DNA, 26 bp, Artificial Sequence
  Made in the lab
tggaacagtttctacaggacactatc

SEQ ID NO: 3780 - DNA, 27 bp, Artificial Sequence
  Made in the lab
ctggaacagtttctacaggacactatc

SEQ ID NO: 3781 - DNA, 28 bp, Artificial Sequence
  Made in the lab
gctggaacagtttctacaggacactatc

SEQ ID NO: 3782 - DNA, 29 bp, Artificial Sequence
  Made in the lab
agctggaacagtttctacaggacactatc

SEQ ID NO: 3783 - DNA, 30 bp, Artificial Sequence
  Made in the lab
gagctggaacagtttctacaggacactatc

SEQ ID NO: 3784 - DNA, 21 bp, Artificial Sequence
  Made in the lab
gtggtaggttctcaagagaga

SEQ ID NO: 3785 - DNA, 22 bp, Artificial Sequence
  Made in the lab
agtggtaggttctcaagagaga

SEQ ID NO: 3786 - DNA, 23 bp, Artificial Sequence
  Made in the lab
aagtggtaggttctcaagagaga

SEQ ID NO: 3787 - DNA, 24 bp, Artificial Sequence
  Made in the lab
aaagtggtaggttctcaagagaga

SEQ ID NO: 3788 - DNA, 25 bp, Artificial Sequence
  Made in the lab
taaagtggtaggttctcaagagaga

SEQ ID NO: 3789 - DNA, 26 bp, Artificial Sequence
  Made in the lab
ttaaagtggtaggttctcaagagaga

SEQ ID NO: 3790 - DNA, 27 bp, Artificial Sequence
  Made in the lab
cttaaagtggtaggttctcaagagaga

SEQ ID NO: 3791 - DNA, 28 bp, Artificial Sequence
  Made in the lab
acttaaagtggtaggttctcaagagaga

SEQ ID NO: 3792 - DNA, 29 bp, Artificial Sequence
  Made in the lab
cacttaaagtggtaggttctcaagagaga

SEQ ID NO: 3793 - DNA, 30 bp, Artificial Sequence
  Made in the lab
acacttaaagtggtaggttctcaagagaga

SEQ ID NO: 3794 - DNA, 21 bp, Artificial Sequence
  Made in the lab
aaggacatgggttgggatttg

SEQ ID NO: 3795 - DNA, 22 bp, Artificial Sequence
  Made in the lab
aaaggacatgggttgggatttg

SEQ ID NO: 3796 - DNA, 23 bp, Artificial Sequence
  Made in the lab
aaaaggacatgggttgggatttg

SEQ ID NO: 3797 - DNA, 24 bp, Artificial Sequence
  Made in the lab
taaaaggacatgggttgggatttg

SEQ ID NO: 3798 - DNA, 25 bp, Artificial Sequence
  Made in the lab
ttaaaaggacatgggttgggatttg

SEQ ID NO: 3799 - DNA, 26 bp, Artificial Sequence
  Made in the lab
tttaaaaggacatgggttgggatttg

SEQ ID NO: 3800 - DNA, 27 bp, Artificial Sequence
  Made in the lab
atttaaaaggacatgggttgggatttg

SEQ ID NO: 3801 - DNA, 28 bp, Artificial Sequence
  Made in the lab
catttaaaaggacatgggttgggatttg

SEQ ID NO: 3802 - DNA, 29 bp, Artificial Sequence
  Made in the lab
acatttaaaaggacatgggttgggatttg

SEQ ID NO: 3803 - DNA, 30 bp, Artificial Sequence
  Made in the lab
gacatttaaaaggacatgggttgggatttg

SEQ ID NO: 3804 - DNA, 21 bp, Artificial Sequence
  Made in the lab
cgaagaagaggagcggaactc

SEQ ID NO: 3805 - DNA, 22 bp, Artificial Sequence
  Made in the lab
acgaagaagaggagcggaactc

SEQ ID NO: 3806 - DNA, 23 bp, Artificial Sequence
  Made in the lab
aacgaagaagaggagcggaactc

SEQ ID NO: 3807 - DNA, 24 bp, Artificial Sequence
  Made in the lab
gaacgaagaagaggagcggaactc

SEQ ID NO: 3808 - DNA, 25 bp, Artificial Sequence
  Made in the lab
agaacgaagaagaggagcggaactc

SEQ ID NO: 3809 - DNA, 26 bp, Artificial Sequence
  Made in the lab
gagaacgaagaagaggagcggaactc

SEQ ID NO: 3810 - DNA, 27 bp, Artificial Sequence
  Made in the lab
ggagaacgaagaagaggagcggaactc

SEQ ID NO: 3811 - DNA, 28 bp, Artificial Sequence
  Made in the lab
tggagaacgaagaagaggagcggaactc

SEQ ID NO: 3812 - DNA, 29 bp, Artificial Sequence
  Made in the lab
ctggagaacgaagaagaggagcggaactc

SEQ ID NO: 3813 - DNA, 30 bp, Artificial Sequence
  Made in the lab
actggagaacgaagaagaggagcggaactc

SEQ ID NO: 3814 - DNA, 21 bp, Artificial Sequence
  Made in the lab
cgctgtggagcaggccagtga

SEQ ID NO: 3815 - DNA, 22 bp, Artificial Sequence
  Made in the lab
acgctgtggagcaggccagtga

SEQ ID NO: 3816 - DNA, 23 bp, Artificial Sequence
  Made in the lab
aacgctgtggagcaggccagtga

SEQ ID NO: 3817 - DNA, 24 bp, Artificial Sequence
  Made in the lab
caacgctgtggagcaggccagtga

SEQ ID NO: 3818 - DNA, 25 bp, Artificial Sequence
  Made in the lab
ccaacgctgtggagcaggccagtga

SEQ ID NO: 3819 - DNA, 26 bp, Artificial Sequence
  Made in the lab
cccaacgctgtggagcaggccagtga

SEQ ID NO: 3820 - DNA, 27 bp, Artificial Sequence
  Made in the lab
gcccaacgctgtggagcaggccagtga

SEQ ID NO: 3821 - DNA, 28 bp, Artificial Sequence
  Made in the lab
tgcccaacgctgtggagcaggccagtga

SEQ ID NO: 3822 - DNA, 29 bp, Artificial Sequence
  Made in the lab
atgcccaacgctgtggagcaggccagtga

SEQ ID NO: 3823 - DNA, 30 bp, Artificial Sequence
  Made in the lab
catgcccaacgctgtggagcaggccagtga

SEQ ID NO: 3824 - DNA, 21 bp, Artificial Sequence
  Made in the lab
gggccaaggcccaggataagg

SEQ ID NO: 3825 - DNA, 22 bp, Artificial Sequence
  Made in the lab
agggccaaggcccaggataagg

SEQ ID NO: 3826 - DNA, 23 bp, Artificial Sequence
  Made in the lab
aagggccaaggcccaggataagg

SEQ ID NO: 3827 - DNA, 24 bp, Artificial Sequence
  Made in the lab
aaagggccaaggcccaggataagg

SEQ ID NO: 3828 - DNA, 25 bp, Artificial Sequence
  Made in the lab
aaaagggccaaggcccaggataagg

SEQ ID NO: 3829 - DNA, 26 bp, Artificial Sequence
  Made in the lab
gaaaagggccaaggcccaggataagg

SEQ ID NO: 3830 - DNA, 27 bp, Artificial Sequence
  Made in the lab
tgaaaagggccaaggcccaggataagg

SEQ ID NO: 3831 - DNA, 28 bp, Artificial Sequence
  Made in the lab
ttgaaaagggccaaggcccaggataagg

SEQ ID NO: 3832 - DNA, 29 bp, Artificial Sequence
  Made in the lab
attgaaaagggccaaggcccaggataagg

SEQ ID NO: 3833 - DNA, 30 bp, Artificial Sequence
  Made in the lab
cattgaaaagggccaaggcccaggataagg

SEQ ID NO: 3834 - DNA, 21 bp, Artificial Sequence
  Made in the lab
gcaaacggaagacacttaaag

SEQ ID NO: 3835 - DNA, 22 bp, Artificial Sequence
  Made in the lab
agcaaacggaagacacttaaag

SEQ ID NO: 3836 - DNA, 23 bp, Artificial Sequence
  Made in the lab
cagcaaacggaagacacttaaag

SEQ ID NO: 3837 - DNA, 24 bp, Artificial Sequence
  Made in the lab
tcagcaaacggaagacacttaaag

SEQ ID NO: 3838 - DNA, 25 bp, Artificial Sequence
  Made in the lab
ctcagcaaacggaagacacttaaag

SEQ ID NO: 3839 - DNA, 26 bp, Artificial Sequence
  Made in the lab
gctcagcaaacggaagacacttaaag

SEQ ID NO: 3840 - DNA, 27 bp, Artificial Sequence
  Made in the lab
agctcagcaaacggaagacacttaaag

SEQ ID NO: 3841 - DNA, 28 bp, Artificial Sequence
  Made in the lab
cagctcagcaaacggaagacacttaaag

SEQ ID NO: 3842 - DNA, 29 bp, Artificial Sequence
  Made in the lab
ccagctcagcaaacggaagacacttaaag

SEQ ID NO: 3843 - DNA, 30 bp, Artificial Sequence
  Made in the lab
accagctcagcaaacggaagacacttaaag

SEQ ID NO: 3844 - DNA, 21 bp, Artificial Sequence
  Made in the lab
ggtataatctgcagatgttgg

SEQ ID NO: 3845 - DNA, 22 bp, Artificial Sequence
  Made in the lab
aggtataatctgcagatgttgg

SEQ ID NO: 3846 - DNA, 23 bp, Artificial Sequence
  Made in the lab
gaggtataatctgcagatgttgg

SEQ ID NO: 3847 - DNA, 24 bp, Artificial Sequence
  Made in the lab
agaggtataatctgcagatgttgg

SEQ ID NO: 3848 - DNA, 25 bp, Artificial Sequence
  Made in the lab
aagaggtataatctgcagatgttgg

SEQ ID NO: 3849 - DNA, 26 bp, Artificial Sequence
  Made in the lab
caagaggtataatctgcagatgttgg

SEQ ID NO: 3850 - DNA, 27 bp, Artificial Sequence
  Made in the lab
tcaagaggtataatctgcagatgttgg

SEQ ID NO: 3851 - DNA, 28 bp, Artificial Sequence
  Made in the lab
atcaagaggtataatctgcagatgttgg

SEQ ID NO: 3852 - DNA, 29 bp, Artificial Sequence
  Made in the lab
tatcaagaggtataatctgcagatgttgg

SEQ ID NO: 3853 - DNA, 30 bp, Artificial Sequence
  Made in the lab
ctatcaagaggtataatctgcagatgttgg

SEQ ID NO: 3854 - DNA, 21 bp, Artificial Sequence
  Made in the lab
gacacttaaagtggtaggttc

SEQ ID NO: 3855 - DNA, 22 bp, Artificial Sequence
  Made in the lab
agacacttaaagtggtaggttc

SEQ ID NO: 3856 - DNA, 23 bp, Artificial Sequence
  Made in the lab
aagacacttaaagtggtaggttc

SEQ ID NO: 3857 - DNA, 24 bp, Artificial Sequence
  Made in the lab
gaagacacttaaagtggtaggttc

SEQ ID NO: 3858 - DNA, 25 bp, Artificial Sequence
  Made in the lab
ggaagacacttaaagtggtaggttc

SEQ ID NO: 3859 - DNA, 26 bp, Artificial Sequence
  Made in the lab
cggaagacacttaaagtggtaggttc

SEQ ID NO: 3860 - DNA, 27 bp, Artificial Sequence
  Made in the lab
acggaagacacttaaagtggtaggttc

SEQ ID NO: 3861 - DNA, 28 bp, Artificial Sequence
  Made in the lab
aacggaagacacttaaagtggtaggttc

SEQ ID NO: 3862 - DNA, 29 bp, Artificial Sequence
  Made in the lab
aaacggaagacacttaaagtggtaggttc

SEQ ID NO: 3863 - DNA, 30 bp, Artificial Sequence
  Made in the lab
caaacggaagacacttaaagtggtaggttc

SEQ ID NO: 3864 - DNA, 21 bp, Artificial Sequence
  Made in the lab
ctactatcaggtgaagctgac

SEQ ID NO: 3865 - DNA, 22 bp, Artificial Sequence
  Made in the lab
actactatcaggtgaagctgac

SEQ ID NO: 3866 - DNA, 23 bp, Artificial Sequence
  Made in the lab
aactactatcaggtgaagctgac

SEQ ID NO: 3867 - DNA, 24 bp, Artificial Sequence
  Made in the lab
caactactatcaggtgaagctgac

SEQ ID NO: 3868 - DNA, 25 bp, Artificial Sequence
  Made in the lab
gcaactactatcaggtgaagctgac

SEQ ID NO: 3869 - DNA, 26 bp, Artificial Sequence
  Made in the lab
agcaactactatcaggtgaagctgac

SEQ ID NO: 3870 - DNA, 27 bp, Artificial Sequence
  Made in the lab
cagcaactactatcaggtgaagctgac

SEQ ID NO: 3871 - DNA, 28 bp, Artificial Sequence
  Made in the lab
gcagcaactactatcaggtgaagctgac

SEQ ID NO: 3872 - DNA, 29 bp, Artificial Sequence
  Made in the lab
ggcagcaactactatcaggtgaagctgac

SEQ ID NO: 3873 - DNA, 30 bp, Artificial Sequence
  Made in the lab
gggcagcaactactatcaggtgaagctgac

SEQ ID NO: 3874 - DNA, 21 bp, Artificial Sequence
  Made in the lab
tctgcagatgttggaagctga

SEQ ID NO: 3875 - DNA, 22 bp, Artificial Sequence
  Made in the lab
atctgcagatgttggaagctga

SEQ ID NO: 3876 - DNA, 23 bp, Artificial Sequence
  Made in the lab
aatctgcagatgttggaagctga

SEQ ID NO: 3877 - DNA, 24 bp, Artificial Sequence
  Made in the lab
taatctgcagatgttggaagctga

SEQ ID NO: 3878 - DNA, 25 bp, Artificial Sequence
  Made in the lab
ataatctgcagatgttggaagctga

SEQ ID NO: 3879 - DNA, 26 bp, Artificial Sequence
  Made in the lab
tataatctgcagatgttggaagctga

SEQ ID NO: 3880 - DNA, 27 bp, Artificial Sequence
  Made in the lab
gtataatctgcagatgttggaagctga

SEQ ID NO: 3881 - DNA, 28 bp, Artificial Sequence
  Made in the lab
ggtataatctgcagatgttggaagctga

SEQ ID NO: 3882 - DNA, 29 bp, Artificial Sequence
  Made in the lab
aggtataatctgcagatgttggaagctga

SEQ ID NO: 3883 - DNA, 30 bp, Artificial Sequence
  Made in the lab
gaggtataatctgcagatgttggaagctga

SEQ ID NO: 3884 - DNA, 21 bp, Artificial Sequence
  Made in the lab
cacgtttattccagaggcagg

SEQ ID NO: 3885 - DNA, 22 bp, Artificial Sequence
  Made in the lab
acacgtttattccagaggcagg

SEQ ID NO: 3886 - DNA, 23 bp, Artificial Sequence
  Made in the lab
aacacgtttattccagaggcagg

SEQ ID NO: 3887 - DNA, 24 bp, Artificial Sequence
  Made in the lab
gaacacgtttattccagaggcagg

SEQ ID NO: 3888 - DNA, 25 bp, Artificial Sequence
  Made in the lab
ggaacacgtttattccagaggcagg

SEQ ID NO: 3889 - DNA, 26 bp, Artificial Sequence
  Made in the lab
gggaacacgtttattccagaggcagg

SEQ ID NO: 3890 - DNA, 27 bp, Artificial Sequence
  Made in the lab
tgggaacacgtttattccagaggcagg

SEQ ID NO: 3891 - DNA, 28 bp, Artificial Sequence
  Made in the lab
ttgggaacacgtttattccagaggcagg

SEQ ID NO: 3892 - DNA, 29 bp, Artificial Sequence
  Made in the lab
tttgggaacacgtttattccagaggcagg

SEQ ID NO: 3893 - DNA, 30 bp, Artificial Sequence
  Made in the lab
atttgggaacacgtttattccagaggcagg

SEQ ID NO: 3894 - DNA, 21 bp, Artificial Sequence
  Made in the lab
aggagtcgcttgtcaaggatc

SEQ ID NO: 3895 - DNA, 22 bp, Artificial Sequence
  Made in the lab
aaggagtcgcttgtcaaggatc

SEQ ID NO: 3896 - DNA, 23 bp, Artificial Sequence
  Made in the lab
aaaggagtcgcttgtcaaggatc

SEQ ID NO: 3897 - DNA, 24 bp, Artificial Sequence
  Made in the lab
caaaggagtcgcttgtcaaggatc

SEQ ID NO: 3898 - DNA, 25 bp, Artificial Sequence
  Made in the lab
acaaaggagtcgcttgtcaaggatc

SEQ ID NO: 3899 - DNA, 26 bp, Artificial Sequence
  Made in the lab
aacaaaggagtcgcttgtcaaggatc

SEQ ID NO: 3900 - DNA, 27 bp, Artificial Sequence
  Made in the lab
gaacaaaggagtcgcttgtcaaggatc

SEQ ID NO: 3901 - DNA, 28 bp, Artificial Sequence
  Made in the lab
ggaacaaaggagtcgcttgtcaaggatc

SEQ ID NO: 3902 - DNA, 29 bp, Artificial Sequence
  Made in the lab
aggaacaaaggagtcgcttgtcaaggatc

SEQ ID NO: 3903 - DNA, 30 bp, Artificial Sequence
  Made in the lab
caggaacaaaggagtcgcttgtcaaggatc

SEQ ID NO: 3904 - DNA, 21 bp, Artificial Sequence
  Made in the lab
ggagtcgcttgtcaaggatct

SEQ ID NO: 3905 - DNA, 22 bp, Artificial Sequence
  Made in the lab
aggagtcgcttgtcaaggatct

SEQ ID NO: 3906 - DNA, 23 bp, Artificial Sequence
  Made in the lab
aaggagtcgcttgtcaaggatct

SEQ ID NO: 3907 - DNA, 24 bp, Artificial Sequence
  Made in the lab
aaaggagtcgcttgtcaaggatct

SEQ ID NO: 3908 - DNA, 25 bp, Artificial Sequence
  Made in the lab
caaaggagtcgcttgtcaaggatct

SEQ ID NO: 3909 - DNA, 26 bp, Artificial Sequence
  Made in the lab
acaaaggagtcgcttgtcaaggatct

SEQ ID NO: 3910 - DNA, 27 bp, Artificial Sequence
  Made in the lab
aacaaaggagtcgcttgtcaaggatct

SEQ ID NO: 3911 - DNA, 28 bp, Artificial Sequence
  Made in the lab
gaacaaaggagtcgcttgtcaaggatct

SEQ ID NO: 3912 - DNA, 29 bp, Artificial Sequence
  Made in the lab
ggaacaaaggagtcgcttgtcaaggatct

SEQ ID NO: 3913 - DNA, 30 bp, Artificial Sequence
  Made in the lab
aggaacaaaggagtcgcttgtcaaggatct

SEQ ID NO: 3914 - DNA, 21 bp, Artificial Sequence
  Made in the lab
cctttcagattccctctggtc

SEQ ID NO: 3915 - DNA, 22 bp, Artificial Sequence
  Made in the lab
acctttcagattccctctggtc

SEQ ID NO: 3916 - DNA, 23 bp, Artificial Sequence
  Made in the lab
aacctttcagattccctctggtc

SEQ ID NO: 3917 - DNA, 24 bp, Artificial Sequence
  Made in the lab
caacctttcagattccctctggtc

SEQ ID NO: 3918 - DNA, 25 bp, Artificial Sequence
  Made in the lab
tcaacctttcagattccctctggtc

SEQ ID NO: 3919 - DNA, 26 bp, Artificial Sequence
  Made in the lab
gtcaacctttcagattccctctggtc

SEQ ID NO: 3920 - DNA, 27 bp, Artificial Sequence
  Made in the lab
ggtcaacctttcagattccctctggtc

SEQ ID NO: 3921 - DNA, 28 bp, Artificial Sequence
  Made in the lab
tggtcaacctttcagattccctctggtc

SEQ ID NO: 3922 - DNA, 29 bp, Artificial Sequence
  Made in the lab
ctggtcaacctttcagattccctctggtc

SEQ ID NO: 3923 - DNA, 30 bp, Artificial Sequence
  Made in the lab
actggtcaacctttcagattccctctggtc

SEQ ID NO: 3924 - DNA, 21 bp, Artificial Sequence
  Made in the lab
aggagctatatgtggctgctg

SEQ ID NO: 3925 - DNA, 22 bp, Artificial Sequence
  Made in the lab
aaggagctatatgtggctgctg

SEQ ID NO: 3926 - DNA, 23 bp, Artificial Sequence
  Made in the lab
aaaggagctatatgtggctgctg

SEQ ID NO: 3927 - DNA, 24 bp, Artificial Sequence
  Made in the lab
caaaggagctatatgtggctgctg

SEQ ID NO: 3928 - DNA, 25 bp, Artificial Sequence
  Made in the lab
tcaaaggagctatatgtggctgctg

SEQ ID NO: 3929 - DNA, 26 bp, Artificial Sequence
  Made in the lab
ctcaaaggagctatatgtggctgctg

SEQ ID NO: 3930 - DNA, 27 bp, Artificial Sequence
  Made in the lab
actcaaaggagctatatgtggctgctg

SEQ ID NO: 3931 - DNA, 28 bp, Artificial Sequence
  Made in the lab
cactcaaaggagctatatgtggctgctg

SEQ ID NO: 3932 - DNA, 29 bp, Artificial Sequence
  Made in the lab
ccactcaaaggagctatatgtggctgctg

SEQ ID NO: 3933 - DNA, 30 bp, Artificial Sequence
  Made in the lab
tccactcaaaggagctatatgtggctgctg

SEQ ID NO: 3934 - DNA, 21 bp, Artificial Sequence
  Made in the lab
actcgctgaatcagggtcttc

SEQ ID NO: 3935 - DNA, 22 bp, Artificial Sequence
  Made in the lab
aactcgctgaatcagggtcttc

SEQ ID NO: 3936 - DNA, 23 bp, Artificial Sequence
  Made in the lab
aaactcgctgaatcagggtcttc

SEQ ID NO: 3937 - DNA, 24 bp, Artificial Sequence
  Made in the lab
caaactcgctgaatcagggtcttc

SEQ ID NO: 3938 - DNA, 25 bp, Artificial Sequence
  Made in the lab
acaaactcgctgaatcagggtcttc

SEQ ID NO: 3939 - DNA, 26 bp, Artificial Sequence
  Made in the lab
tacaaactcgctgaatcagggtcttc

SEQ ID NO: 3940 - DNA, 27 bp, Artificial Sequence
  Made in the lab
atacaaactcgctgaatcagggtcttc

SEQ ID NO: 3941 - DNA, 28 bp, Artificial Sequence
  Made in the lab
tatacaaactcgctgaatcagggtcttc

SEQ ID NO: 3942 - DNA, 29 bp, Artificial Sequence
  Made in the lab
gtatacaaactcgctgaatcagggtcttc

SEQ ID NO: 3943 - DNA, 30 bp, Artificial Sequence
  Made in the lab
tgtatacaaactcgctgaatcagggtcttc

SEQ ID NO: 3944 - DNA, 21 bp, Artificial Sequence
  Made in the lab
accccctccagatcctgtata

SEQ ID NO: 3945 - DNA, 22 bp, Artificial Sequence
  Made in the lab
aaccccctccagatcctgtata

SEQ ID NO: 3946 - DNA, 23 bp, Artificial Sequence
  Made in the lab
aaaccccctccagatcctgtata

SEQ ID NO: 3947 - DNA, 24 bp, Artificial Sequence
  Made in the lab
caaaccccctccagatcctgtata

SEQ ID NO: 3948 - DNA, 25 bp, Artificial Sequence
  Made in the lab
ccaaaccccctccagatcctgtata

SEQ ID NO: 3949 - DNA, 26 bp, Artificial Sequence
  Made in the lab
tccaaaccccctccagatcctgtata

SEQ ID NO: 3950 - DNA, 27 bp, Artificial Sequence
  Made in the lab
ttccaaaccccctccagatcctgtata

SEQ ID NO: 3951 - DNA, 28 bp, Artificial Sequence
  Made in the lab
gttccaaaccccctccagatcctgtata

SEQ ID NO: 3952 - DNA, 29 bp, Artificial Sequence
  Made in the lab
tgttccaaaccccctccagatcctgtata

SEQ ID NO: 3953 - DNA, 30 bp, Artificial Sequence
  Made in the lab
atgttccaaaccccctccagatcctgtata

SEQ ID NO: 3954 - DNA, 21 bp, Artificial Sequence
  Made in the lab
ggacaccgtcctagggtataa

SEQ ID NO: 3955 - DNA, 22 bp, Artificial Sequence
  Made in the lab
aggacaccgtcctagggtataa

SEQ ID NO: 3956 - DNA, 23 bp, Artificial Sequence
  Made in the lab
aaggacaccgtcctagggtataa

SEQ ID NO: 3957 - DNA, 24 bp, Artificial Sequence
  Made in the lab
gaaggacaccgtcctagggtataa

SEQ ID NO: 3958 - DNA, 25 bp, Artificial Sequence
  Made in the lab
ggaaggacaccgtcctagggtataa

SEQ ID NO: 3959 - DNA, 26 bp, Artificial Sequence
  Made in the lab
gggaaggacaccgtcctagggtataa

SEQ ID NO: 3960 - DNA, 27 bp, Artificial Sequence
  Made in the lab
agggaaggacaccgtcctagggtataa

SEQ ID NO: 3961 - DNA, 28 bp, Artificial Sequence
  Made in the lab
gagggaaggacaccgtcctagggtataa

SEQ ID NO: 3962 - DNA, 29 bp, Artificial Sequence
  Made in the lab
ggagggaaggacaccgtcctagggtataa

SEQ ID NO: 3963 - DNA, 30 bp, Artificial Sequence
  Made in the lab
gggagggaaggacaccgtcctagggtataa

SEQ ID NO: 3964 - DNA, 21 bp, Artificial Sequence
  Made in the lab
gggacacactcaggacaccaa

SEQ ID NO: 3965 - DNA, 22 bp, Artificial Sequence
  Made in the lab
agggacacactcaggacaccaa

SEQ ID NO: 3966 - DNA, 23 bp, Artificial Sequence
  Made in the lab
aagggacacactcaggacaccaa

SEQ ID NO: 3967 - DNA, 24 bp, Artificial Sequence
  Made in the lab
taagggacacactcaggacaccaa

SEQ ID NO: 3968 - DNA, 25 bp, Artificial Sequence
  Made in the lab
ttaagggacacactcaggacaccaa

SEQ ID NO: 3969 - DNA, 26 bp, Artificial Sequence
  Made in the lab
cttaagggacacactcaggacaccaa

SEQ ID NO: 3970 - DNA, 27 bp, Artificial Sequence
  Made in the lab
ccttaagggacacactcaggacaccaa

SEQ ID NO: 3971 - DNA, 28 bp, Artificial Sequence
  Made in the lab
tccttaagggacacactcaggacaccaa

SEQ ID NO: 3972 - DNA, 29 bp, Artificial Sequence
  Made in the lab
atccttaagggacacactcaggacaccaa

SEQ ID NO: 3973 - DNA, 30 bp, Artificial Sequence
  Made in the lab
gatccttaagggacacactcaggacaccaa

SEQ ID NO: 3974 - DNA, 21 bp, Artificial Sequence
  Made in the lab
gttggaagcagccaccaaagc

SEQ ID NO: 3975 - DNA, 22 bp, Artificial Sequence
  Made in the lab
agttggaagcagccaccaaagc

SEQ ID NO: 3976 - DNA, 23 bp, Artificial Sequence
  Made in the lab
aagttggaagcagccaccaaagc

SEQ ID NO: 3977 - DNA, 24 bp, Artificial Sequence
  Made in the lab
caagttggaagcagccaccaaagc

SEQ ID NO: 3978 - DNA, 25 bp, Artificial Sequence
  Made in the lab
ccaagttggaagcagccaccaaagc

SEQ ID NO: 3979 - DNA, 26 bp, Artificial Sequence
  Made in the lab
cccaagttggaagcagccaccaaagc

SEQ ID NO: 3980 - DNA, 27 bp, Artificial Sequence
  Made in the lab
ccccaagttggaagcagccaccaaagc

SEQ ID NO: 3981 - DNA, 28 bp, Artificial Sequence
  Made in the lab
accccaagttggaagcagccaccaaagc

SEQ ID NO: 3982 - DNA, 29 bp, Artificial Sequence
  Made in the lab
caccccaagttggaagcagccaccaaagc

SEQ ID NO: 3983 - DNA, 30 bp, Artificial Sequence
  Made in the lab
acaccccaagttggaagcagccaccaaagc

SEQ ID NO: 3984 - DNA, 21 bp, Artificial Sequence
  Made in the lab
gctatcattggtgccctcctc

SEQ ID NO: 3985 - DNA, 22 bp, Artificial Sequence
  Made in the lab
agctatcattggtgccctcctc

SEQ ID NO: 3986 - DNA, 23 bp, Artificial Sequence
  Made in the lab
aagctatcattggtgccctcctc

SEQ ID NO: 3987 - DNA, 24 bp, Artificial Sequence
  Made in the lab
gaagctatcattggtgccctcctc

SEQ ID NO: 3988 - DNA, 25 bp, Artificial Sequence
  Made in the lab
agaagctatcattggtgccctcctc

SEQ ID NO: 3989 - DNA, 26 bp, Artificial Sequence
  Made in the lab
gagaagctatcattggtgccctcctc

SEQ ID NO: 3990 - DNA, 27 bp, Artificial Sequence
  Made in the lab
ggagaagctatcattggtgccctcctc

SEQ ID NO: 3991 - DNA, 28 bp, Artificial Sequence
  Made in the lab
gggagaagctatcattggtgccctcctc

SEQ ID NO: 3992 - DNA, 29 bp, Artificial Sequence
  Made in the lab
tgggagaagctatcattggtgccctcctc

SEQ ID NO: 3993 - DNA, 30 bp, Artificial Sequence
  Made in the lab
ctgggagaagctatcattggtgccctcctc

SEQ ID NO: 3994 - DNA, 21 bp, Artificial Sequence
  Made in the lab
cctggcaataaaccgtgcctc

SEQ ID NO: 3995 - DNA, 22 bp, Artificial Sequence
  Made in the lab
acctggcaataaaccgtgcctc

SEQ ID NO: 3996 - DNA, 23 bp, Artificial Sequence
  Made in the lab
aacctggcaataaaccgtgcctc

SEQ ID NO: 3997 - DNA, 24 bp, Artificial Sequence
  Made in the lab
taacctggcaataaaccgtgcctc

SEQ ID NO: 3998 - DNA, 25 bp, Artificial Sequence
  Made in the lab
ataacctggcaataaaccgtgcctc

SEQ ID NO: 3999 - DNA, 26 bp, Artificial Sequence
  Made in the lab
tataacctggcaataaaccgtgcctc

SEQ ID NO: 4000 - DNA, 27 bp, Artificial Sequence
  Made in the lab
gtataacctggcaataaaccgtgcctc

SEQ ID NO: 4001 - DNA, 28 bp, Artificial Sequence
  Made in the lab
ggtataacctggcaataaaccgtgcctc

SEQ ID NO: 4002 - DNA, 29 bp, Artificial Sequence
  Made in the lab
gggtataacctggcaataaaccgtgcctc

SEQ ID NO: 4003 - DNA, 30 bp, Artificial Sequence
  Made in the lab
agggtataacctggcaataaaccgtgcctc

SEQ ID NO: 4004 - DNA, 21 bp, Artificial Sequence
  Made in the lab
ggacccctggaggaatgcttg

SEQ ID NO: 4005 - DNA, 22 bp, Artificial Sequence
  Made in the lab
aggacccctggaggaatgcttg

SEQ ID NO: 4006 - DNA, 23 bp, Artificial Sequence
  Made in the lab
aaggacccctggaggaatgcttg

SEQ ID NO: 4007 - DNA, 24 bp, Artificial Sequence
  Made in the lab
gaaggacccctggaggaatgcttg

SEQ ID NO: 4008 - DNA, 25 bp, Artificial Sequence
  Made in the lab
agaaggacccctggaggaatgcttg

SEQ ID NO: 4009 - DNA, 26 bp, Artificial Sequence
  Made in the lab
aagaaggacccctggaggaatgcttg

SEQ ID NO: 4010 - DNA, 27 bp, Artificial Sequence
  Made in the lab
gaagaaggacccctggaggaatgcttg

SEQ ID NO: 4011 - DNA, 28 bp, Artificial Sequence
  Made in the lab
ggaagaaggacccctggaggaatgcttg

SEQ ID NO: 4012 - DNA, 29 bp, Artificial Sequence
  Made in the lab
aggaagaaggacccctggaggaatgcttg

SEQ ID NO: 4013 - DNA, 30 bp, Artificial Sequence
  Made in the lab
gaggaagaaggacccctggaggaatgcttg

SEQ ID NO: 4014 - DNA, 21 bp, Artificial Sequence
  Made in the lab
aggtggcaggtgccctacaga

SEQ ID NO: 4015 - DNA, 22 bp, Artificial Sequence
  Made in the lab
aaggtggcaggtgccctacaga

SEQ ID NO: 4016 - DNA, 23 bp, Artificial Sequence
  Made in the lab
aaaggtggcaggtgccctacaga

SEQ ID NO: 4017 - DNA, 24 bp, Artificial Sequence
  Made in the lab
aaaaggtggcaggtgccctacaga

SEQ ID NO: 4018 - DNA, 25 bp, Artificial Sequence
  Made in the lab
aaaaaggtggcaggtgccctacaga

SEQ ID NO: 4019 - DNA, 26 bp, Artificial Sequence
  Made in the lab
gaaaaaggtggcaggtgccctacaga

SEQ ID NO: 4020 - DNA, 27 bp, Artificial Sequence
  Made in the lab
ggaaaaaggtggcaggtgccctacaga

SEQ ID NO: 4021 - DNA, 28 bp, Artificial Sequence
  Made in the lab
gggaaaaaggtggcaggtgccctacaga

SEQ ID NO: 4022 - DNA, 29 bp, Artificial Sequence
  Made in the lab
ggggaaaaaggtggcaggtgccctacaga

SEQ ID NO: 4023 - DNA, 30 bp, Artificial Sequence
  Made in the lab
tggggaaaaaggtggcaggtgccctacaga

SEQ ID NO: 4024 - DNA, 21 bp, Artificial Sequence
  Made in the lab
cccactgctggactggaccta

SEQ ID NO: 4025 - DNA, 22 bp, Artificial Sequence
  Made in the lab
acccactgctggactggaccta

SEQ ID NO: 4026 - DNA, 23 bp, Artificial Sequence
  Made in the lab
aacccactgctggactggaccta

SEQ ID NO: 4027 - DNA, 24 bp, Artificial Sequence
  Made in the lab
caacccactgctggactggaccta

SEQ ID NO: 4028 - DNA, 25 bp, Artificial Sequence
  Made in the lab
tcaacccactgctggactggaccta

SEQ ID NO: 4029 - DNA, 26 bp, Artificial Sequence
  Made in the lab
atcaacccactgctggactggaccta

SEQ ID NO: 4030 - DNA, 27 bp, Artificial Sequence
  Made in the lab
catcaacccactgctggactggaccta

SEQ ID NO: 4031 - DNA, 28 bp, Artificial Sequence
  Made in the lab
gcatcaacccactgctggactggaccta

SEQ ID NO: 4032 - DNA, 29 bp, Artificial Sequence
  Made in the lab
cgcatcaacccactgctggactggaccta

SEQ ID NO: 4033 - DNA, 30 bp, Artificial Sequence
  Made in the lab
gcgcatcaacccactgctggactggaccta

SEQ ID NO: 4034 - DNA, 21 bp, Artificial Sequence
  Made in the lab
gtgcctgagcccaggaggaca

SEQ ID NO: 4035 - DNA, 22 bp, Artificial Sequence
  Made in the lab
agtgcctgagcccaggaggaca

SEQ ID NO: 4036 - DNA, 23 bp, Artificial Sequence
  Made in the lab
aagtgcctgagcccaggaggaca

SEQ ID NO: 4037 - DNA, 24 bp, Artificial Sequence
  Made in the lab
gaagtgcctgagcccaggaggaca

SEQ ID NO: 4038 - DNA, 25 bp, Artificial Sequence
  Made in the lab
tgaagtgcctgagcccaggaggaca

SEQ ID NO: 4039 - DNA, 26 bp, Artificial Sequence
  Made in the lab
ctgaagtgcctgagcccaggaggaca

SEQ ID NO: 4040 - DNA, 27 bp, Artificial Sequence
  Made in the lab
cctgaagtgcctgagcccaggaggaca

SEQ ID NO: 4041 - DNA, 28 bp, Artificial Sequence
  Made in the lab
ccctgaagtgcctgagcccaggaggaca

SEQ ID NO: 4042 - DNA, 29 bp, Artificial Sequence
  Made in the lab
gccctgaagtgcctgagcccaggaggaca

SEQ ID NO: 4043 - DNA, 30 bp, Artificial Sequence
  Made in the lab
ggccctgaagtgcctgagcccaggaggaca

SEQ ID NO: 4044 - DNA, 21 bp, Artificial Sequence
  Made in the lab
cacttaaagtggtaggttctc

SEQ ID NO: 4045 - DNA, 22 bp, Artificial Sequence
  Made in the lab
acacttaaagtggtaggttctc

SEQ ID NO: 4046 - DNA, 23 bp, Artificial Sequence
  Made in the lab
gacacttaaagtggtaggttctc

SEQ ID NO: 4047 - DNA, 24 bp, Artificial Sequence
  Made in the lab
agacacttaaagtggtaggttctc

SEQ ID NO: 4048 - DNA, 25 bp, Artificial Sequence
  Made in the lab
aagacacttaaagtggtaggttctc

SEQ ID NO: 4049 - DNA, 26 bp, Artificial Sequence
  Made in the lab
gaagacacttaaagtggtaggttctc

SEQ ID NO: 4050 - DNA, 27 bp, Artificial Sequence
  Made in the lab
ggaagacacttaaagtggtaggttctc

SEQ ID NO: 4051 - DNA, 28 bp, Artificial Sequence
  Made in the lab
cggaagacacttaaagtggtaggttctc

SEQ ID NO: 4052 - DNA, 29 bp, Artificial Sequence
  Made in the lab
acggaagacacttaaagtggtaggttctc

SEQ ID NO: 4053 - DNA, 30 bp, Artificial Sequence
  Made in the lab
aacggaagacacttaaagtggtaggttctc

SEQ ID NO: 4054 - DNA, 21 bp, Artificial Sequence
  Made in the lab
ttggactggtccaaccttata

SEQ ID NO: 4055 - DNA, 22 bp, Artificial Sequence
  Made in the lab
attggactggtccaaccttata

SEQ ID NO: 4056 - DNA, 23 bp, Artificial Sequence
  Made in the lab
aattggactggtccaaccttata

SEQ ID NO: 4057 - DNA, 24 bp, Artificial Sequence
  Made in the lab
gaattggactggtccaaccttata

SEQ ID NO: 4058 - DNA, 25 bp, Artificial Sequence
  Made in the lab
ggaattggactggtccaaccttata

SEQ ID NO: 4059 - DNA, 26 bp, Artificial Sequence
  Made in the lab
aggaattggactggtccaaccttata

SEQ ID NO: 4060 - DNA, 27 bp, Artificial Sequence
  Made in the lab
gaggaattggactggtccaaccttata

SEQ ID NO: 4061 - DNA, 28 bp, Artificial Sequence
  Made in the lab
ggaggaattggactggtccaaccttata

SEQ ID NO: 4062 - DNA, 29 bp, Artificial Sequence
  Made in the lab
tggaggaattggactggtccaaccttata

SEQ ID NO: 4063 - DNA, 30 bp, Artificial Sequence
  Made in the lab
ttggaggaattggactggtccaaccttata

SEQ ID NO: 4064 - DNA, 21 bp, Artificial Sequence
  Made in the lab
gcagttggtggcaaattaagt

SEQ ID NO: 4065 - DNA, 22 bp, Artificial Sequence
  Made in the lab
agcagttggtggcaaattaagt

SEQ ID NO: 4066 - DNA, 23 bp, Artificial Sequence
  Made in the lab
aagcagttggtggcaaattaagt

SEQ ID NO: 4067 - DNA, 24 bp, Artificial Sequence
  Made in the lab
gaagcagttggtggcaaattaagt

SEQ ID NO: 4068 - DNA, 25 bp, Artificial Sequence
  Made in the lab
tgaagcagttggtggcaaattaagt

SEQ ID NO: 4069 - DNA, 26 bp, Artificial Sequence
  Made in the lab
ttgaagcagttggtggcaaattaagt

SEQ ID NO: 4070 - DNA, 27 bp, Artificial Sequence
  Made in the lab
attgaagcagttggtggcaaattaagt

SEQ ID NO: 4071 - DNA, 28 bp, Artificial Sequence
  Made in the lab
aattgaagcagttggtggcaaattaagt

SEQ ID NO: 4072 - DNA, 29 bp, Artificial Sequence
  Made in the lab
gaattgaagcagttggtggcaaattaagt

SEQ ID NO: 4073 - DNA, 30 bp, Artificial Sequence
  Made in the lab
ggaattgaagcagttggtggcaaattaagt

SEQ ID NO: 4074 - DNA, 21 bp, Artificial Sequence
  Made in the lab
gctgaaagctggatacctaat

SEQ ID NO: 4075 - DNA, 22 bp, Artificial Sequence
  Made in the lab
agctgaaagctggatacctaat

SEQ ID NO: 4076 - DNA, 23 bp, Artificial Sequence
  Made in the lab
aagctgaaagctggatacctaat

SEQ ID NO: 4077 - DNA, 24 bp, Artificial Sequence
  Made in the lab
caagctgaaagctggatacctaat

SEQ ID NO: 4078 - DNA, 25 bp, Artificial Sequence
  Made in the lab
acaagctgaaagctggatacctaat

SEQ ID NO: 4079 - DNA, 26 bp, Artificial Sequence
  Made in the lab
aacaagctgaaagctggatacctaat

SEQ ID NO: 4080 - DNA, 27 bp, Artificial Sequence
  Made in the lab
gaacaagctgaaagctggatacctaat

SEQ ID NO: 4081 - DNA, 28 bp, Artificial Sequence
  Made in the lab
agaacaagctgaaagctggatacctaat

SEQ ID NO: 4082 - DNA, 29 bp, Artificial Sequence
  Made in the lab
aagaacaagctgaaagctggatacctaat

SEQ ID NO: 4083 - DNA, 30 bp, Artificial Sequence
  Made in the lab
caagaacaagctgaaagctggatacctaat

SEQ ID NO: 4084 - DNA, 21 bp, Artificial Sequence
  Made in the lab
ggagcttcatctttcaagata

SEQ ID NO: 4085 - DNA, 22 bp, Artificial Sequence
  Made in the lab
aggagcttcatctttcaagata

SEQ ID NO: 4086 - DNA, 23 bp, Artificial Sequence
  Made in the lab
aaggagcttcatctttcaagata

SEQ ID NO: 4087 - DNA, 24 bp, Artificial Sequence
  Made in the lab
aaaggagcttcatctttcaagata

SEQ ID NO: 4088 - DNA, 25 bp, Artificial Sequence
  Made in the lab
aaaaggagcttcatctttcaagata

SEQ ID NO: 4089 - DNA, 26 bp, Artificial Sequence
  Made in the lab
caaaaggagcttcatctttcaagata

SEQ ID NO: 4090 - DNA, 27 bp, Artificial Sequence
  Made in the lab
acaaaaggagcttcatctttcaagata

SEQ ID NO: 4091 - DNA, 28 bp, Artificial Sequence
  Made in the lab
gacaaaaggagcttcatctttcaagata

SEQ ID NO: 4092 - DNA, 29 bp, Artificial Sequence
  Made in the lab
cgacaaaaggagcttcatctttcaagata

SEQ ID NO: 4093 - DNA, 30 bp, Artificial Sequence
  Made in the lab
acgacaaaaggagcttcatctttcaagata

SEQ ID NO: 4094 - DNA, 21 bp, Artificial Sequence
  Made in the lab
gtgcaagaatggctttgattg

SEQ ID NO: 4095 - DNA, 22 bp, Artificial Sequence
  Made in the lab
agtgcaagaatggctttgattg

SEQ ID NO: 4096 - DNA, 23 bp, Artificial Sequence
  Made in the lab
aagtgcaagaatggctttgattg

SEQ ID NO: 4097 - DNA, 24 bp, Artificial Sequence
  Made in the lab
caagtgcaagaatggctttgattg

SEQ ID NO: 4098 - DNA, 25 bp, Artificial Sequence
  Made in the lab
acaagtgcaagaatggctttgattg

SEQ ID NO: 4099 - DNA, 26 bp, Artificial Sequence
  Made in the lab
cacaagtgcaagaatggctttgattg

SEQ ID NO: 4100 - DNA, 27 bp, Artificial Sequence
  Made in the lab
tcacaagtgcaagaatggctttgattg

SEQ ID NO: 4101 - DNA, 28 bp, Artificial Sequence
  Made in the lab
ttcacaagtgcaagaatggctttgattg

SEQ ID NO: 4102 - DNA, 29 bp, Artificial Sequence
  Made in the lab
tttcacaagtgcaagaatggctttgattg

SEQ ID NO: 4103 - DNA, 30 bp, Artificial Sequence
  Made in the lab
atttcacaagtgcaagaatggctttgattg

SEQ ID NO: 4104 - DNA, 21 bp, Artificial Sequence
  Made in the lab
ctcagcagccatttgatgttt

SEQ ID NO: 4105 - DNA, 22 bp, Artificial Sequence
  Made in the lab
actcagcagccatttgatgttt

SEQ ID NO: 4106 - DNA, 23 bp, Artificial Sequence
  Made in the lab
aactcagcagccatttgatgttt

SEQ ID NO: 4107 - DNA, 24 bp, Artificial Sequence
  Made in the lab
caactcagcagccatttgatgttt

SEQ ID NO: 4108 - DNA, 25 bp, Artificial Sequence
  Made in the lab
gcaactcagcagccatttgatgttt

SEQ ID NO: 4109 - DNA, 26 bp, Artificial Sequence
  Made in the lab
ggcaactcagcagccatttgatgttt

SEQ ID NO: 4110 - DNA, 27 bp, Artificial Sequence
  Made in the lab
aggcaactcagcagccatttgatgttt

SEQ ID NO: 4111 - DNA, 28 bp, Artificial Sequence
  Made in the lab
aaggcaactcagcagccatttgatgttt

SEQ ID NO: 4112 - DNA, 29 bp, Artificial Sequence
  Made in the lab
caaggcaactcagcagccatttgatgttt

SEQ ID NO: 4113 - DNA, 30 bp, Artificial Sequence
  Made in the lab
ccaaggcaactcagcagccatttgatgttt

SEQ ID NO: 4114 - DNA, 21 bp, Artificial Sequence
  Made in the lab
tggagttcctgctcaatgtca

SEQ ID NO: 4115 - DNA, 22 bp, Artificial Sequence
  Made in the lab
atggagttcctgctcaatgtca

SEQ ID NO: 4116 - DNA, 23 bp, Artificial Sequence
  Made in the lab
aatggagttcctgctcaatgtca

SEQ ID NO: 4117 - DNA, 24 bp, Artificial Sequence
  Made in the lab
taatggagttcctgctcaatgtca

SEQ ID NO: 4118 - DNA, 25 bp, Artificial Sequence
  Made in the lab
ctaatggagttcctgctcaatgtca

SEQ ID NO: 4119 - DNA, 26 bp, Artificial Sequence
  Made in the lab
tctaatggagttcctgctcaatgtca

SEQ ID NO: 4120 - DNA, 27 bp, Artificial Sequence
  Made in the lab
ttctaatggagttcctgctcaatgtca

SEQ ID NO: 4121 - DNA, 28 bp, Artificial Sequence
  Made in the lab
attctaatggagttcctgctcaatgtca

SEQ ID NO: 4122 - DNA, 29 bp, Artificial Sequence
  Made in the lab
tattctaatggagttcctgctcaatgtca

SEQ ID NO: 4123 - DNA, 30 bp, Artificial Sequence
  Made in the lab
atattctaatggagttcctgctcaatgtca

SEQ ID NO: 4124 - DNA, 21 bp, Artificial Sequence
  Made in the lab
tccgcagactcatgtcattga

SEQ ID NO: 4125 - DNA, 22 bp, Artificial Sequence
  Made in the lab
atccgcagactcatgtcattga

SEQ ID NO: 4126 - DNA, 23 bp, Artificial Sequence
  Made in the lab
aatccgcagactcatgtcattga

SEQ ID NO: 4127 - DNA, 24 bp, Artificial Sequence
  Made in the lab
gaatccgcagactcatgtcattga

SEQ ID NO: 4128 - DNA, 25 bp, Artificial Sequence
  Made in the lab
agaatccgcagactcatgtcattga

SEQ ID NO: 4129 - DNA, 26 bp, Artificial Sequence
  Made in the lab
cagaatccgcagactcatgtcattga

SEQ ID NO: 4130 - DNA, 27 bp, Artificial Sequence
  Made in the lab
tcagaatccgcagactcatgtcattga

SEQ ID NO: 4131 - DNA, 28 bp, Artificial Sequence
  Made in the lab
ttcagaatccgcagactcatgtcattga

SEQ ID NO: 4132 - DNA, 29 bp, Artificial Sequence
  Made in the lab
tttcagaatccgcagactcatgtcattga

SEQ ID NO: 4133 - DNA, 30 bp, Artificial Sequence
  Made in the lab
ctttcagaatccgcagactcatgtcattga

SEQ ID NO: 4134 - DNA, 21 bp, Artificial Sequence
  Made in the lab
caagggaaaacatggcttata

SEQ ID NO: 4135 - DNA, 22 bp, Artificial Sequence
  Made in the lab
acaagggaaaacatggcttata

SEQ ID NO: 4136 - DNA, 23 bp, Artificial Sequence
  Made in the lab
aacaagggaaaacatggcttata

SEQ ID NO: 4137 - DNA, 24 bp, Artificial Sequence
  Made in the lab
caacaagggaaaacatggcttata

SEQ ID NO: 4138 - DNA, 25 bp, Artificial Sequence
  Made in the lab
gcaacaagggaaaacatggcttata

SEQ ID NO: 4139 - DNA, 26 bp, Artificial Sequence
  Made in the lab
cgcaacaagggaaaacatggcttata

SEQ ID NO: 4140 - DNA, 27 bp, Artificial Sequence
  Made in the lab
ccgcaacaagggaaaacatggcttata

SEQ ID NO: 4141 - DNA, 28 bp, Artificial Sequence
  Made in the lab
accgcaacaagggaaaacatggcttata

SEQ ID NO: 4142 - DNA, 29 bp, Artificial Sequence
  Made in the lab
gaccgcaacaagggaaaacatggcttata

SEQ ID NO: 4143 - DNA, 30 bp, Artificial Sequence
  Made in the lab
tgaccgcaacaagggaaaacatggcttata

SEQ ID NO: 4144 - DNA, 21 bp, Artificial Sequence
  Made in the lab
ggctgcctataatcaagtaaa

SEQ ID NO: 4145 - DNA, 22 bp, Artificial Sequence
  Made in the lab
aggctgcctataatcaagtaaa

SEQ ID NO: 4146 - DNA, 23 bp, Artificial Sequence
  Made in the lab
aaggctgcctataatcaagtaaa

SEQ ID NO: 4147 - DNA, 24 bp, Artificial Sequence
  Made in the lab
caaggctgcctataatcaagtaaa

SEQ ID NO: 4148 - DNA, 25 bp, Artificial Sequence
  Made in the lab
tcaaggctgcctataatcaagtaaa

SEQ ID NO: 4149 - DNA, 26 bp, Artificial Sequence
  Made in the lab
atcaaggctgcctataatcaagtaaa

SEQ ID NO: 4150 - DNA, 27 bp, Artificial Sequence
  Made in the lab
tatcaaggctgcctataatcaagtaaa

SEQ ID NO: 4151 - DNA, 28 bp, Artificial Sequence
  Made in the lab
ttatcaaggctgcctataatcaagtaaa

SEQ ID NO: 4152 - DNA, 29 bp, Artificial Sequence
  Made in the lab
gttatcaaggctgcctataatcaagtaaa

SEQ ID NO: 4153 - DNA, 30 bp, Artificial Sequence
  Made in the lab
tgttatcaaggctgcctataatcaagtaaa

SEQ ID NO: 4154 - DNA, 21 bp, Artificial Sequence
  Made in the lab
atgcggcaaagaagtttgttt

SEQ ID NO: 4155 - DNA, 22 bp, Artificial Sequence
  Made in the lab
aatgcggcaaagaagtttgttt

SEQ ID NO: 4156 - DNA, 23 bp, Artificial Sequence
  Made in the lab
aaatgcggcaaagaagtttgttt

SEQ ID NO: 4157 - DNA, 24 bp, Artificial Sequence
  Made in the lab
taaatgcggcaaagaagtttgttt

SEQ ID NO: 4158 - DNA, 25 bp, Artificial Sequence
  Made in the lab
ataaatgcggcaaagaagtttgttt

SEQ ID NO: 4159 - DNA, 26 bp, Artificial Sequence
  Made in the lab
cataaatgcggcaaagaagtttgttt

SEQ ID NO: 4160 - DNA, 27 bp, Artificial Sequence
  Made in the lab
tcataaatgcggcaaagaagtttgttt

SEQ ID NO: 4161 - DNA, 28 bp, Artificial Sequence
  Made in the lab
atcataaatgcggcaaagaagtttgttt

SEQ ID NO: 4162 - DNA, 29 bp, Artificial Sequence
  Made in the lab
tatcataaatgcggcaaagaagtttgttt

SEQ ID NO: 4163 - DNA, 30 bp, Artificial Sequence
  Made in the lab
atatcataaatgcggcaaagaagtttgttt

SEQ ID NO: 4164 - DNA, 21 bp, Artificial Sequence
  Made in the lab
tgtcaccacagcaccagaatt

SEQ ID NO: 4165 - DNA, 22 bp, Artificial Sequence
  Made in the lab
atgtcaccacagcaccagaatt

SEQ ID NO: 4166 - DNA, 23 bp, Artificial Sequence
  Made in the lab
aatgtcaccacagcaccagaatt

SEQ ID NO: 4167 - DNA, 24 bp, Artificial Sequence
  Made in the lab
caatgtcaccacagcaccagaatt

SEQ ID NO: 4168 - DNA, 25 bp, Artificial Sequence
  Made in the lab
tcaatgtcaccacagcaccagaatt

SEQ ID NO: 4169 - DNA, 26 bp, Artificial Sequence
  Made in the lab
ctcaatgtcaccacagcaccagaatt

SEQ ID NO: 4170 - DNA, 27 bp, Artificial Sequence
  Made in the lab
gctcaatgtcaccacagcaccagaatt

SEQ ID NO: 4171 - DNA, 28 bp, Artificial Sequence
  Made in the lab
tgctcaatgtcaccacagcaccagaatt

SEQ ID NO: 4172 - DNA, 29 bp, Artificial Sequence
  Made in the lab
ctgctcaatgtcaccacagcaccagaatt

SEQ ID NO: 4173 - DNA, 30 bp, Artificial Sequence
  Made in the lab
cctgctcaatgtcaccacagcaccagaatt

SEQ ID NO: 4174 - DNA, 21 bp, Artificial Sequence
  Made in the lab
ccatcttgctttcctttaatc

SEQ ID NO: 4175 - DNA, 22 bp, Artificial Sequence
  Made in the lab
accatcttgctttcctttaatc

SEQ ID NO: 4176 - DNA, 23 bp, Artificial Sequence
  Made in the lab
caccatcttgctttcctttaatc

SEQ ID NO: 4177 - DNA, 24 bp, Artificial Sequence
  Made in the lab
ccaccatcttgctttcctttaatc

SEQ ID NO: 4178 - DNA, 25 bp, Artificial Sequence
  Made in the lab
gccaccatcttgctttcctttaatc

SEQ ID NO: 4179 - DNA, 26 bp, Artificial Sequence
  Made in the lab
cgccaccatcttgctttcctttaatc

SEQ ID NO: 4180 - DNA, 27 bp, Artificial Sequence
  Made in the lab
ccgccaccatcttgctttcctttaatc

SEQ ID NO: 4181 - DNA, 28 bp, Artificial Sequence
  Made in the lab
tccgccaccatcttgctttcctttaatc

SEQ ID NO: 4182 - DNA, 29 bp, Artificial Sequence
  Made in the lab
ctccgccaccatcttgctttcctttaatc

SEQ ID NO: 4183 - DNA, 30 bp, Artificial Sequence
  Made in the lab
cctccgccaccatcttgctttcctttaatc

SEQ ID NO: 4184 - DNA, 21 bp, Artificial Sequence
  Made in the lab
gtgcagaggcaaatgcattta

SEQ ID NO: 4185 - DNA, 22 bp, Artificial Sequence
  Made in the lab
agtgcagaggcaaatgcattta

SEQ ID NO: 4186 - DNA, 23 bp, Artificial Sequence
  Made in the lab
aagtgcagaggcaaatgcattta

SEQ ID NO: 4187 - DNA, 24 bp, Artificial Sequence
  Made in the lab
gaagtgcagaggcaaatgcattta

SEQ ID NO: 4188 - DNA, 25 bp, Artificial Sequence
  Made in the lab
ggaagtgcagaggcaaatgcattta

SEQ ID NO: 4189 - DNA, 26 bp, Artificial Sequence
  Made in the lab
gggaagtgcagaggcaaatgcattta

SEQ ID NO: 4190 - DNA, 27 bp, Artificial Sequence
  Made in the lab
cgggaagtgcagaggcaaatgcattta

SEQ ID NO: 4191 - DNA, 28 bp, Artificial Sequence
  Made in the lab
gcgggaagtgcagaggcaaatgcattta

SEQ ID NO: 4192 - DNA, 29 bp, Artificial Sequence
  Made in the lab
cgcgggaagtgcagaggcaaatgcattta

SEQ ID NO: 4193 - DNA, 30 bp, Artificial Sequence
  Made in the lab
tcgcgggaagtgcagaggcaaatgcattta

SEQ ID NO: 4194 - DNA, 21 bp, Artificial Sequence
  Made in the lab
ccatttcacaagtgcaagaat

SEQ ID NO: 4195 - DNA, 22 bp, Artificial Sequence
  Made in the lab
accatttcacaagtgcaagaat

SEQ ID NO: 4196 - DNA, 23 bp, Artificial Sequence
  Made in the lab
aaccatttcacaagtgcaagaat

SEQ ID NO: 4197 - DNA, 24 bp, Artificial Sequence
  Made in the lab
gaaccatttcacaagtgcaagaat

SEQ ID NO: 4198 - DNA, 25 bp, Artificial Sequence
  Made in the lab
agaaccatttcacaagtgcaagaat

SEQ ID NO: 4199 - DNA, 26 bp, Artificial Sequence
  Made in the lab
cagaaccatttcacaagtgcaagaat

SEQ ID NO: 4200 - DNA, 27 bp, Artificial Sequence
  Made in the lab
tcagaaccatttcacaagtgcaagaat

SEQ ID NO: 4201 - DNA, 28 bp, Artificial Sequence
  Made in the lab
ttcagaaccatttcacaagtgcaagaat

SEQ ID NO: 4202 - DNA, 29 bp, Artificial Sequence
  Made in the lab
gttcagaaccatttcacaagtgcaagaat

SEQ ID NO: 4203 - DNA, 30 bp, Artificial Sequence
  Made in the lab
cgttcagaaccatttcacaagtgcaagaat

SEQ ID NO: 4204 - DNA, 21 bp, Artificial Sequence
  Made in the lab
gcaagttgctgaacagtttct

SEQ ID NO: 4205 - DNA, 22 bp, Artificial Sequence
  Made in the lab
agcaagttgctgaacagtttct

SEQ ID NO: 4206 - DNA, 23 bp, Artificial Sequence
  Made in the lab
aagcaagttgctgaacagtttct

SEQ ID NO: 4207 - DNA, 24 bp, Artificial Sequence
  Made in the lab
aaagcaagttgctgaacagtttct

SEQ ID NO: 4208 - DNA, 25 bp, Artificial Sequence
  Made in the lab
taaagcaagttgctgaacagtttct

SEQ ID NO: 4209 - DNA, 26 bp, Artificial Sequence
  Made in the lab
ctaaagcaagttgctgaacagtttct

SEQ ID NO: 4210 - DNA, 27 bp, Artificial Sequence
  Made in the lab
tctaaagcaagttgctgaacagtttct

SEQ ID NO: 4211 - DNA, 28 bp, Artificial Sequence
  Made in the lab
ttctaaagcaagttgctgaacagtttct

SEQ ID NO: 4212 - DNA, 29 bp, Artificial Sequence
  Made in the lab
gttctaaagcaagttgctgaacagtttct

SEQ ID NO: 4213 - DNA, 30 bp, Artificial Sequence
  Made in the lab
tgttctaaagcaagttgctgaacagtttct

SEQ ID NO: 4214 - DNA, 21 bp, Artificial Sequence
  Made in the lab
aaagcagtgacgtacattatt

SEQ ID NO: 4215 - DNA, 22 bp, Artificial Sequence
  Made in the lab
aaaagcagtgacgtacattatt

SEQ ID NO: 4216 - DNA, 23 bp, Artificial Sequence
  Made in the lab
aaaaagcagtgacgtacattatt

SEQ ID NO: 4217 - DNA, 24 bp, Artificial Sequence
  Made in the lab
caaaaagcagtgacgtacattatt

SEQ ID NO: 4218 - DNA, 25 bp, Artificial Sequence
  Made in the lab
gcaaaaagcagtgacgtacattatt

SEQ ID NO: 4219 - DNA, 26 bp, Artificial Sequence
  Made in the lab
cgcaaaaagcagtgacgtacattatt

SEQ ID NO: 4220 - DNA, 27 bp, Artificial Sequence
  Made in the lab
acgcaaaaagcagtgacgtacattatt

SEQ ID NO: 4221 - DNA, 28 bp, Artificial Sequence
  Made in the lab
aacgcaaaaagcagtgacgtacattatt

SEQ ID NO: 4222 - DNA, 29 bp, Artificial Sequence
  Made in the lab
gaacgcaaaaagcagtgacgtacattatt

SEQ ID NO: 4223 - DNA, 30 bp, Artificial Sequence
  Made in the lab
agaacgcaaaaagcagtgacgtacattatt

SEQ ID NO: 4224 - DNA, 21 bp, Artificial Sequence
  Made in the lab
ctattctcctgtatcaagaat

SEQ ID NO: 4225 - DNA, 22 bp, Artificial Sequence
  Made in the lab
actattctcctgtatcaagaat

SEQ ID NO: 4226 - DNA, 23 bp, Artificial Sequence
  Made in the lab
aactattctcctgtatcaagaat

SEQ ID NO: 4227 - DNA, 24 bp, Artificial Sequence
  Made in the lab
aaactattctcctgtatcaagaat

SEQ ID NO: 4228 - DNA, 25 bp, Artificial Sequence
  Made in the lab
aaaactattctcctgtatcaagaat

SEQ ID NO: 4229 - DNA, 26 bp, Artificial Sequence
  Made in the lab
gaaaactattctcctgtatcaagaat

SEQ ID NO: 4230 - DNA, 27 bp, Artificial Sequence
  Made in the lab
ggaaaactattctcctgtatcaagaat

SEQ ID NO: 4231 - DNA, 28 bp, Artificial Sequence
  Made in the lab
tggaaaactattctcctgtatcaagaat

SEQ ID NO: 4232 - DNA, 29 bp, Artificial Sequence
  Made in the lab
ttggaaaactattctcctgtatcaagaat

SEQ ID NO: 4233 - DNA, 30 bp, Artificial Sequence
  Made in the lab
tttggaaaactattctcctgtatcaagaat

SEQ ID NO: 4234 - DNA, 21 bp, Artificial Sequence
  Made in the lab
gtcagaagtctctaatatatc

SEQ ID NO: 4235 - DNA, 22 bp, Artificial Sequence
  Made in the lab
agtcagaagtctctaatatatc

SEQ ID NO: 4236 - DNA, 23 bp, Artificial Sequence
  Made in the lab
aagtcagaagtctctaatatatc

SEQ ID NO: 4237 - DNA, 24 bp, Artificial Sequence
  Made in the lab
aaagtcagaagtctctaatatatc

SEQ ID NO: 4238 - DNA, 25 bp, Artificial Sequence
  Made in the lab
gaaagtcagaagtctctaatatatc

SEQ ID NO: 4239 - DNA, 26 bp, Artificial Sequence
  Made in the lab
tgaaagtcagaagtctctaatatatc

SEQ ID NO: 4240 - DNA, 27 bp, Artificial Sequence
  Made in the lab
atgaaagtcagaagtctctaatatatc

SEQ ID NO: 4241 - DNA, 28 bp, Artificial Sequence
  Made in the lab
catgaaagtcagaagtctctaatatatc

SEQ ID NO: 4242 - DNA, 29 bp, Artificial Sequence
  Made in the lab
acatgaaagtcagaagtctctaatatatc

SEQ ID NO: 4243 - DNA, 30 bp, Artificial Sequence
  Made in the lab
cacatgaaagtcagaagtctctaatatatc

SEQ ID NO: 4244 - DNA, 21 bp, Artificial Sequence
  Made in the lab
ggcataaatgcaggtaattat

SEQ ID NO: 4245 - DNA, 22 bp, Artificial Sequence
  Made in the lab
aggcataaatgcaggtaattat

SEQ ID NO: 4246 - DNA, 23 bp, Artificial Sequence
  Made in the lab
aaggcataaatgcaggtaattat

SEQ ID NO: 4247 - DNA, 24 bp, Artificial Sequence
  Made in the lab
taaggcataaatgcaggtaattat

SEQ ID NO: 4248 - DNA, 25 bp, Artificial Sequence
  Made in the lab
ataaggcataaatgcaggtaattat

SEQ ID NO: 4249 - DNA, 26 bp, Artificial Sequence
  Made in the lab
aataaggcataaatgcaggtaattat

SEQ ID NO: 4250 - DNA, 27 bp, Artificial Sequence
  Made in the lab
aaataaggcataaatgcaggtaattat

SEQ ID NO: 4251 - DNA, 28 bp, Artificial Sequence
  Made in the lab
aaaataaggcataaatgcaggtaattat

SEQ ID NO: 4252 - DNA, 29 bp, Artificial Sequence
  Made in the lab
taaaataaggcataaatgcaggtaattat

SEQ ID NO: 4253 - DNA, 30 bp, Artificial Sequence
  Made in the lab
gtaaaataaggcataaatgcaggtaattat

SEQ ID NO: 4254 - DNA, 21 bp, Artificial Sequence
  Made in the lab
acaatagctcaaggaaacctt

SEQ ID NO: 4255 - DNA, 22 bp, Artificial Sequence
  Made in the lab
aacaatagctcaaggaaacctt

SEQ ID NO: 4256 - DNA, 23 bp, Artificial Sequence
  Made in the lab
aaacaatagctcaaggaaacctt

SEQ ID NO: 4257 - DNA, 24 bp, Artificial Sequence
  Made in the lab
aaaacaatagctcaaggaaacctt

SEQ ID NO: 4258 - DNA, 25 bp, Artificial Sequence
  Made in the lab
aaaaacaatagctcaaggaaacctt

SEQ ID NO: 4259 - DNA, 26 bp, Artificial Sequence
  Made in the lab
taaaaacaatagctcaaggaaacctt

SEQ ID NO: 4260 - DNA, 27 bp, Artificial Sequence
  Made in the lab
gtaaaaacaatagctcaaggaaacctt

SEQ ID NO: 4261 - DNA, 28 bp, Artificial Sequence
  Made in the lab
agtaaaaacaatagctcaaggaaacctt

SEQ ID NO: 4262 - DNA, 29 bp, Artificial Sequence
  Made in the lab
aagtaaaaacaatagctcaaggaaacctt

SEQ ID NO: 4263 - DNA, 30 bp, Artificial Sequence
  Made in the lab
caagtaaaaacaatagctcaaggaaacctt

SEQ ID NO: 4264 - DNA, 21 bp, Artificial Sequence
  Made in the lab
atggcttggtgattgcttctt

SEQ ID NO: 4265 - DNA, 22 bp, Artificial Sequence
  Made in the lab
aatggcttggtgattgcttctt

SEQ ID NO: 4266 - DNA, 23 bp, Artificial Sequence
  Made in the lab
aaatggcttggtgattgcttctt

SEQ ID NO: 4267 - DNA, 24 bp, Artificial Sequence
  Made in the lab
caaatggcttggtgattgcttctt

SEQ ID NO: 4268 - DNA, 25 bp, Artificial Sequence
  Made in the lab
ccaaatggcttggtgattgcttctt

SEQ ID NO: 4269 - DNA, 26 bp, Artificial Sequence
  Made in the lab
accaaatggcttggtgattgcttctt

SEQ ID NO: 4270 - DNA, 27 bp, Artificial Sequence
  Made in the lab
taccaaatggcttggtgattgcttctt

SEQ ID NO: 4271 - DNA, 28 bp, Artificial Sequence
  Made in the lab
ttaccaaatggcttggtgattgcttctt

SEQ ID NO: 4272 - DNA, 29 bp, Artificial Sequence
  Made in the lab
gttaccaaatggcttggtgattgcttctt

SEQ ID NO: 4273 - DNA, 30 bp, Artificial Sequence
  Made in the lab
agttaccaaatggcttggtgattgcttctt

SEQ ID NO: 4274 - DNA, 21 bp, Artificial Sequence
  Made in the lab
catggcttatactgtggaatg

SEQ ID NO: 4275 - DNA, 22 bp, Artificial Sequence
  Made in the lab
acatggcttatactgtggaatg

SEQ ID NO: 4276 - DNA, 23 bp, Artificial Sequence
  Made in the lab
aacatggcttatactgtggaatg

SEQ ID NO: 4277 - DNA, 24 bp, Artificial Sequence
  Made in the lab
aaacatggcttatactgtggaatg

SEQ ID NO: 4278 - DNA, 25 bp, Artificial Sequence
  Made in the lab
aaaacatggcttatactgtggaatg

SEQ ID NO: 4279 - DNA, 26 bp, Artificial Sequence
  Made in the lab
gaaaacatggcttatactgtggaatg

SEQ ID NO: 4280 - DNA, 27 bp, Artificial Sequence
  Made in the lab
ggaaaacatggcttatactgtggaatg

SEQ ID NO: 4281 - DNA, 28 bp, Artificial Sequence
  Made in the lab
gggaaaacatggcttatactgtggaatg

SEQ ID NO: 4282 - DNA, 29 bp, Artificial Sequence
  Made in the lab
agggaaaacatggcttatactgtggaatg

SEQ ID NO: 4283 - DNA, 30 bp, Artificial Sequence
  Made in the lab
aagggaaaacatggcttatactgtggaatg

SEQ ID NO: 4284 - DNA, 21 bp, Artificial Sequence
  Made in the lab
agcaagttgctgaacagtttc

SEQ ID NO: 4285 - DNA, 22 bp, Artificial Sequence
  Made in the lab
aagcaagttgctgaacagtttc

SEQ ID NO: 4286 - DNA, 23 bp, Artificial Sequence
  Made in the lab
aaagcaagttgctgaacagtttc

SEQ ID NO: 4287 - DNA, 24 bp, Artificial Sequence
  Made in the lab
taaagcaagttgctgaacagtttc

SEQ ID NO: 4288 - DNA, 25 bp, Artificial Sequence
  Made in the lab
ctaaagcaagttgctgaacagtttc

SEQ ID NO: 4289 - DNA, 26 bp, Artificial Sequence
  Made in the lab
tctaaagcaagttgctgaacagtttc

SEQ ID NO: 4290 - DNA, 27 bp, Artificial Sequence
  Made in the lab
ttctaaagcaagttgctgaacagtttc

SEQ ID NO: 4291 - DNA, 28 bp, Artificial Sequence
  Made in the lab
gttctaaagcaagttgctgaacagtttc

SEQ ID NO: 4292 - DNA, 29 bp, Artificial Sequence
  Made in the lab
tgttctaaagcaagttgctgaacagtttc

SEQ ID NO: 4293 - DNA, 30 bp, Artificial Sequence
  Made in the lab
ctgttctaaagcaagttgctgaacagtttc

SEQ ID NO: 4294 - DNA, 21 bp, Artificial Sequence
  Made in the lab
gataacccgtggaattgaagc

SEQ ID NO: 4295 - DNA, 22 bp, Artificial Sequence
  Made in the lab
agataacccgtggaattgaagc

SEQ ID NO: 4296 - DNA, 23 bp, Artificial Sequence
  Made in the lab
aagataacccgtggaattgaagc

SEQ ID NO: 4297 - DNA, 24 bp, Artificial Sequence
  Made in the lab
caagataacccgtggaattgaagc

SEQ ID NO: 4298 - DNA, 25 bp, Artificial Sequence
  Made in the lab
tcaagataacccgtggaattgaagc

SEQ ID NO: 4299 - DNA, 26 bp, Artificial Sequence
  Made in the lab
ttcaagataacccgtggaattgaagc

SEQ ID NO: 4300 - DNA, 27 bp, Artificial Sequence
  Made in the lab
tttcaagataacccgtggaattgaagc

SEQ ID NO: 4301 - DNA, 28 bp, Artificial Sequence
  Made in the lab
ctttcaagataacccgtggaattgaagc

SEQ ID NO: 4302 - DNA, 29 bp, Artificial Sequence
  Made in the lab
tctttcaagataacccgtggaattgaagc

SEQ ID NO: 4303 - DNA, 30 bp, Artificial Sequence
  Made in the lab
atctttcaagataacccgtggaattgaagc

SEQ ID NO: 4304 - DNA, 21 bp, Artificial Sequence
  Made in the lab
cctcaggaccttgagtttacc

SEQ ID NO: 4305 - DNA, 22 bp, Artificial Sequence
  Made in the lab
acctcaggaccttgagtttacc

SEQ ID NO: 4306 - DNA, 23 bp, Artificial Sequence
  Made in the lab
aacctcaggaccttgagtttacc

SEQ ID NO: 4307 - DNA, 24 bp, Artificial Sequence
  Made in the lab
caacctcaggaccttgagtttacc

SEQ ID NO: 4308 - DNA, 25 bp, Artificial Sequence
  Made in the lab
acaacctcaggaccttgagtttacc

SEQ ID NO: 4309 - DNA, 26 bp, Artificial Sequence
  Made in the lab
cacaacctcaggaccttgagtttacc

SEQ ID NO: 4310 - DNA, 27 bp, Artificial Sequence
  Made in the lab
ccacaacctcaggaccttgagtttacc

SEQ ID NO: 4311 - DNA, 28 bp, Artificial Sequence
  Made in the lab
gccacaacctcaggaccttgagtttacc

SEQ ID NO: 4312 - DNA, 29 bp, Artificial Sequence
  Made in the lab
cgccacaacctcaggaccttgagtttacc

SEQ ID NO: 4313 - DNA, 30 bp, Artificial Sequence
  Made in the lab
ccgccacaacctcaggaccttgagtttacc

SEQ ID NO: 4314 - DNA, 21 bp, Artificial Sequence
  Made in the lab
ccacccatttgctgcgtctta

SEQ ID NO: 4315 - DNA, 22 bp, Artificial Sequence
  Made in the lab
accacccatttgctgcgtctta

SEQ ID NO: 4316 - DNA, 23 bp, Artificial Sequence
  Made in the lab
aaccacccatttgctgcgtctta

SEQ ID NO: 4317 - DNA, 24 bp, Artificial Sequence
  Made in the lab
gaaccacccatttgctgcgtctta

SEQ ID NO: 4318 - DNA, 25 bp, Artificial Sequence
  Made in the lab
ggaaccacccatttgctgcgtctta

SEQ ID NO: 4319 - DNA, 26 bp, Artificial Sequence
  Made in the lab
aggaaccacccatttgctgcgtctta

SEQ ID NO: 4320 - DNA, 27 bp, Artificial Sequence
  Made in the lab
taggaaccacccatttgctgcgtctta

SEQ ID NO: 4321 - DNA, 28 bp, Artificial Sequence
  Made in the lab
ttaggaaccacccatttgctgcgtctta

SEQ ID NO: 4322 - DNA, 29 bp, Artificial Sequence
  Made in the lab
tttaggaaccacccatttgctgcgtctta

SEQ ID NO: 4323 - DNA, 30 bp, Artificial Sequence
  Made in the lab
atttaggaaccacccatttgctgcgtctta

SEQ ID NO: 4324 - DNA, 21 bp, Artificial Sequence
  Made in the lab
cccgtggaattgaagcagttg

SEQ ID NO: 4325 - DNA, 22 bp, Artificial Sequence
  Made in the lab
acccgtggaattgaagcagttg

SEQ ID NO: 4326 - DNA, 23 bp, Artificial Sequence
  Made in the lab
aacccgtggaattgaagcagttg

SEQ ID NO: 4327 - DNA, 24 bp, Artificial Sequence
  Made in the lab
taacccgtggaattgaagcagttg

SEQ ID NO: 4328 - DNA, 25 bp, Artificial Sequence
  Made in the lab
ataacccgtggaattgaagcagttg

SEQ ID NO: 4329 - DNA, 26 bp, Artificial Sequence
  Made in the lab
gataacccgtggaattgaagcagttg

SEQ ID NO: 4330 - DNA, 27 bp, Artificial Sequence
  Made in the lab
agataacccgtggaattgaagcagttg

SEQ ID NO: 4331 - DNA, 28 bp, Artificial Sequence
  Made in the lab
aagataacccgtggaattgaagcagttg

SEQ ID NO: 4332 - DNA, 29 bp, Artificial Sequence
  Made in the lab
caagataacccgtggaattgaagcagttg

SEQ ID NO: 4333 - DNA, 30 bp, Artificial Sequence
  Made in the lab
tcaagataacccgtggaattgaagcagttg

SEQ ID NO: 4334 - DNA, 21 bp, Artificial Sequence
  Made in the lab
tctcctgaagcctccaacgtc

SEQ ID NO: 4335 - DNA, 22 bp, Artificial Sequence
  Made in the lab
atctcctgaagcctccaacgtc

SEQ ID NO: 4336 - DNA, 23 bp, Artificial Sequence
  Made in the lab
aatctcctgaagcctccaacgtc

SEQ ID NO: 4337 - DNA, 24 bp, Artificial Sequence
  Made in the lab
gaatctcctgaagcctccaacgtc

SEQ ID NO: 4338 - DNA, 25 bp, Artificial Sequence
  Made in the lab
ggaatctcctgaagcctccaacgtc

SEQ ID NO: 4339 - DNA, 26 bp, Artificial Sequence
  Made in the lab
aggaatctcctgaagcctccaacgtc

SEQ ID NO: 4340 - DNA, 27 bp, Artificial Sequence
  Made in the lab
caggaatctcctgaagcctccaacgtc

SEQ ID NO: 4341 - DNA, 28 bp, Artificial Sequence
  Made in the lab
gcaggaatctcctgaagcctccaacgtc

SEQ ID NO: 4342 - DNA, 29 bp, Artificial Sequence
  Made in the lab
ggcaggaatctcctgaagcctccaacgtc

SEQ ID NO: 4343 - DNA, 30 bp, Artificial Sequence
  Made in the lab
tggcaggaatctcctgaagcctccaacgtc

SEQ ID NO: 4344 - DNA, 21 bp, Artificial Sequence
  Made in the lab
gtcgggtcccaggctctagtt

SEQ ID NO: 4345 - DNA, 22 bp, Artificial Sequence
  Made in the lab
agtcgggtcccaggctctagtt

SEQ ID NO: 4346 - DNA, 23 bp, Artificial Sequence
  Made in the lab
aagtcgggtcccaggctctagtt

SEQ ID NO: 4347 - DNA, 24 bp, Artificial Sequence
  Made in the lab
gaagtcgggtcccaggctctagtt

SEQ ID NO: 4348 - DNA, 25 bp, Artificial Sequence
  Made in the lab
agaagtcgggtcccaggctctagtt

SEQ ID NO: 4349 - DNA, 26 bp, Artificial Sequence
  Made in the lab
aagaagtcgggtcccaggctctagtt

SEQ ID NO: 4350 - DNA, 27 bp, Artificial Sequence
  Made in the lab
gaagaagtcgggtcccaggctctagtt

SEQ ID NO: 4351 - DNA, 28 bp, Artificial Sequence
  Made in the lab
ggaagaagtcgggtcccaggctctagtt

SEQ ID NO: 4352 - DNA, 29 bp, Artificial Sequence
  Made in the lab
tggaagaagtcgggtcccaggctctagtt

SEQ ID NO: 4353 - DNA, 30 bp, Artificial Sequence
  Made in the lab
ctggaagaagtcgggtcccaggctctagtt

SEQ ID NO: 4354 - DNA, 21 bp, Artificial Sequence
  Made in the lab
cagtccttcagcagattgatt

SEQ ID NO: 4355 - DNA, 22 bp, Artificial Sequence
  Made in the lab
acagtccttcagcagattgatt

SEQ ID NO: 4356 - DNA, 23 bp, Artificial Sequence
  Made in the lab
cacagtccttcagcagattgatt

SEQ ID NO: 4357 - DNA, 24 bp, Artificial Sequence
  Made in the lab
ccacagtccttcagcagattgatt

SEQ ID NO: 4358 - DNA, 25 bp, Artificial Sequence
  Made in the lab
tccacagtccttcagcagattgatt

SEQ ID NO: 4359 - DNA, 26 bp, Artificial Sequence
  Made in the lab
atccacagtccttcagcagattgatt

SEQ ID NO: 4360 - DNA, 27 bp, Artificial Sequence
  Made in the lab
catccacagtccttcagcagattgatt

SEQ ID NO: 4361 - DNA, 28 bp, Artificial Sequence
  Made in the lab
ccatccacagtccttcagcagattgatt

SEQ ID NO: 4362 - DNA, 29 bp, Artificial Sequence
  Made in the lab
accatccacagtccttcagcagattgatt

SEQ ID NO: 4363 - DNA, 30 bp, Artificial Sequence
  Made in the lab
caccatccacagtccttcagcagattgatt

SEQ ID NO: 4364 - DNA, 21 bp, Artificial Sequence
  Made in the lab
ggatttattgacattgctact

SEQ ID NO: 4365 - DNA, 22 bp, Artificial Sequence
  Made in the lab
aggatttattgacattgctact

SEQ ID NO: 4366 - DNA, 23 bp, Artificial Sequence
  Made in the lab
aaggatttattgacattgctact

SEQ ID NO: 4367 - DNA, 24 bp, Artificial Sequence
  Made in the lab
caaggatttattgacattgctact

SEQ ID NO: 4368 - DNA, 25 bp, Artificial Sequence
  Made in the lab
ccaaggatttattgacattgctact

SEQ ID NO: 4369 - DNA, 26 bp, Artificial Sequence
  Made in the lab
cccaaggatttattgacattgctact

SEQ ID NO: 4370 - DNA, 27 bp, Artificial Sequence
  Made in the lab
ccccaaggatttattgacattgctact

SEQ ID NO: 4371 - DNA, 28 bp, Artificial Sequence
  Made in the lab
tccccaaggatttattgacattgctact

SEQ ID NO: 4372 - DNA, 29 bp, Artificial Sequence
  Made in the lab
ttccccaaggatttattgacattgctact

SEQ ID NO: 4373 - DNA, 30 bp, Artificial Sequence
  Made in the lab
cttccccaaggatttattgacattgctact

SEQ ID NO: 4374 - DNA, 21 bp, Artificial Sequence
  Made in the lab
ggacaaagcaggacctcataa

SEQ ID NO: 4375 - DNA, 22 bp, Artificial Sequence
  Made in the lab
aggacaaagcaggacctcataa

SEQ ID NO: 4376 - DNA, 23 bp, Artificial Sequence
  Made in the lab
aaggacaaagcaggacctcataa

SEQ ID NO: 4377 - DNA, 24 bp, Artificial Sequence
  Made in the lab
taaggacaaagcaggacctcataa

SEQ ID NO: 4378 - DNA, 25 bp, Artificial Sequence
  Made in the lab
ttaaggacaaagcaggacctcataa

SEQ ID NO: 4379 - DNA, 26 bp, Artificial Sequence
  Made in the lab
gttaaggacaaagcaggacctcataa

SEQ ID NO: 4380 - DNA, 27 bp, Artificial Sequence
  Made in the lab
tgttaaggacaaagcaggacctcataa

SEQ ID NO: 4381 - DNA, 28 bp, Artificial Sequence
  Made in the lab
ttgttaaggacaaagcaggacctcataa

SEQ ID NO: 4382 - DNA, 29 bp, Artificial Sequence
  Made in the lab
gttgttaaggacaaagcaggacctcataa

SEQ ID NO: 4383 - DNA, 30 bp, Artificial Sequence
  Made in the lab
ggttgttaaggacaaagcaggacctcataa

SEQ ID NO: 4384 - DNA, 21 bp, Artificial Sequence
  Made in the lab
gcaggacctcataaggaaatc

SEQ ID NO: 4385 - DNA, 22 bp, Artificial Sequence
  Made in the lab
agcaggacctcataaggaaatc

SEQ ID NO: 4386 - DNA, 23 bp, Artificial Sequence
  Made in the lab
aagcaggacctcataaggaaatc

SEQ ID NO: 4387 - DNA, 24 bp, Artificial Sequence
  Made in the lab
aaagcaggacctcataaggaaatc

SEQ ID NO: 4388 - DNA, 25 bp, Artificial Sequence
  Made in the lab
caaagcaggacctcataaggaaatc

SEQ ID NO: 4389 - DNA, 26 bp, Artificial Sequence
  Made in the lab
acaaagcaggacctcataaggaaatc

SEQ ID NO: 4390 - DNA, 27 bp, Artificial Sequence
  Made in the lab
gacaaagcaggacctcataaggaaatc

SEQ ID NO: 4391 - DNA, 28 bp, Artificial Sequence
  Made in the lab
ggacaaagcaggacctcataaggaaatc

SEQ ID NO: 4392 - DNA, 29 bp, Artificial Sequence
  Made in the lab
aggacaaagcaggacctcataaggaaatc

SEQ ID NO: 4393 - DNA, 30 bp, Artificial Sequence
  Made in the lab
aaggacaaagcaggacctcataaggaaatc

SEQ ID NO: 4394 - DNA, 21 bp, Artificial Sequence
  Made in the lab
ttgcgtaaagggataaacaca

SEQ ID NO: 4395 - DNA, 22 bp, Artificial Sequence
  Made in the lab
attgcgtaaagggataaacaca

SEQ ID NO: 4396 - DNA, 23 bp, Artificial Sequence
  Made in the lab
aattgcgtaaagggataaacaca

SEQ ID NO: 4397 - DNA, 24 bp, Artificial Sequence
  Made in the lab
gaattgcgtaaagggataaacaca

SEQ ID NO: 4398 - DNA, 25 bp, Artificial Sequence
  Made in the lab
ggaattgcgtaaagggataaacaca

SEQ ID NO: 4399 - DNA, 26 bp, Artificial Sequence
  Made in the lab
gggaattgcgtaaagggataaacaca

SEQ ID NO: 4400 - DNA, 27 bp, Artificial Sequence
  Made in the lab
tgggaattgcgtaaagggataaacaca

SEQ ID NO: 4401 - DNA, 28 bp, Artificial Sequence
  Made in the lab
ctgggaattgcgtaaagggataaacaca

SEQ ID NO: 4402 - DNA, 29 bp, Artificial Sequence
  Made in the lab
cctgggaattgcgtaaagggataaacaca

SEQ ID NO: 4403 - DNA, 30 bp, Artificial Sequence
  Made in the lab
gcctgggaattgcgtaaagggataaacaca

SEQ ID NO: 4404 - DNA, 21 bp, Artificial Sequence
  Made in the lab
acacacttgttacctatgata

SEQ ID NO: 4405 - DNA, 22 bp, Artificial Sequence
  Made in the lab
aacacacttgttacctatgata

SEQ ID NO: 4406 - DNA, 23 bp, Artificial Sequence
  Made in the lab
aaacacacttgttacctatgata

SEQ ID NO: 4407 - DNA, 24 bp, Artificial Sequence
  Made in the lab
taaacacacttgttacctatgata

SEQ ID NO: 4408 - DNA, 25 bp, Artificial Sequence
  Made in the lab
ataaacacacttgttacctatgata

SEQ ID NO: 4409 - DNA, 26 bp, Artificial Sequence
  Made in the lab
gataaacacacttgttacctatgata

SEQ ID NO: 4410 - DNA, 27 bp, Artificial Sequence
  Made in the lab
ggataaacacacttgttacctatgata

SEQ ID NO: 4411 - DNA, 28 bp, Artificial Sequence
  Made in the lab
gggataaacacacttgttacctatgata

SEQ ID NO: 4412 - DNA, 29 bp, Artificial Sequence
  Made in the lab
agggataaacacacttgttacctatgata

SEQ ID NO: 4413 - DNA, 30 bp, Artificial Sequence
  Made in the lab
aagggataaacacacttgttacctatgata

SEQ ID NO: 4414 - DNA, 21 bp, Artificial Sequence
  Made in the lab
gggataaacacacttgttacc

SEQ ID NO: 4415 - DNA, 22 bp, Artificial Sequence
  Made in the lab
agggataaacacacttgttacc

SEQ ID NO: 4416 - DNA, 23 bp, Artificial Sequence
  Made in the lab
aagggataaacacacttgttacc

SEQ ID NO: 4417 - DNA, 24 bp, Artificial Sequence
  Made in the lab
aaagggataaacacacttgttacc

SEQ ID NO: 4418 - DNA, 25 bp, Artificial Sequence
  Made in the lab
taaagggataaacacacttgttacc

SEQ ID NO: 4419 - DNA, 26 bp, Artificial Sequence
  Made in the lab
gtaaagggataaacacacttgttacc

SEQ ID NO: 4420 - DNA, 27 bp, Artificial Sequence
  Made in the lab
cgtaaagggataaacacacttgttacc

SEQ ID NO: 4421 - DNA, 28 bp, Artificial Sequence
  Made in the lab
gcgtaaagggataaacacacttgttacc

SEQ ID NO: 4422 - DNA, 29 bp, Artificial Sequence
  Made in the lab
tgcgtaaagggataaacacacttgttacc

SEQ ID NO: 4423 - DNA, 30 bp, Artificial Sequence
  Made in the lab
ttgcgtaaagggataaacacacttgttacc

SEQ ID NO: 4424 - DNA, 21 bp, Artificial Sequence
  Made in the lab
ctgggccttgacaaagtgtaa

SEQ ID NO: 4425 - DNA, 22 bp, Artificial Sequence
  Made in the lab
actgggccttgacaaagtgtaa

SEQ ID NO: 4426 - DNA, 23 bp, Artificial Sequence
  Made in the lab
aactgggccttgacaaagtgtaa

SEQ ID NO: 4427 - DNA, 24 bp, Artificial Sequence
  Made in the lab
gaactgggccttgacaaagtgtaa

SEQ ID NO: 4428 - DNA, 25 bp, Artificial Sequence
  Made in the lab
ggaactgggccttgacaaagtgtaa

SEQ ID NO: 4429 - DNA, 26 bp, Artificial Sequence
  Made in the lab
aggaactgggccttgacaaagtgtaa

SEQ ID NO: 4430 - DNA, 27 bp, Artificial Sequence
  Made in the lab
gaggaactgggccttgacaaagtgtaa

SEQ ID NO: 4431 - DNA, 28 bp, Artificial Sequence
  Made in the lab
ggaggaactgggccttgacaaagtgtaa

SEQ ID NO: 4432 - DNA, 29 bp, Artificial Sequence
  Made in the lab
cggaggaactgggccttgacaaagtgtaa

SEQ ID NO: 4433 - DNA, 30 bp, Artificial Sequence
  Made in the lab
ccggaggaactgggccttgacaaagtgtaa

SEQ ID NO: 4434 - DNA, 21 bp, Artificial Sequence
  Made in the lab
agcaggacctcataaggaaat

SEQ ID NO: 4435 - DNA, 22 bp, Artificial Sequence
  Made in the lab
aagcaggacctcataaggaaat

SEQ ID NO: 4436 - DNA, 23 bp, Artificial Sequence
  Made in the lab
aaagcaggacctcataaggaaat

SEQ ID NO: 4437 - DNA, 24 bp, Artificial Sequence
  Made in the lab
caaagcaggacctcataaggaaat

SEQ ID NO: 4438 - DNA, 25 bp, Artificial Sequence
  Made in the lab
acaaagcaggacctcataaggaaat

SEQ ID NO: 4439 - DNA, 26 bp, Artificial Sequence
  Made in the lab
gacaaagcaggacctcataaggaaat

SEQ ID NO: 4440 - DNA, 27 bp, Artificial Sequence
  Made in the lab
ggacaaagcaggacctcataaggaaat

SEQ ID NO: 4441 - DNA, 28 bp, Artificial Sequence
  Made in the lab
aggacaaagcaggacctcataaggaaat

SEQ ID NO: 4442 - DNA, 29 bp, Artificial Sequence
  Made in the lab
aaggacaaagcaggacctcataaggaaat

SEQ ID NO: 4443 - DNA, 30 bp, Artificial Sequence
  Made in the lab
taaggacaaagcaggacctcataaggaaat

SEQ ID NO: 4444 - DNA, 21 bp, Artificial Sequence
  Made in the lab
gccatgtaatggtaacttgga

SEQ ID NO: 4445 - DNA, 22 bp, Artificial Sequence
  Made in the lab
agccatgtaatggtaacttgga

SEQ ID NO: 4446 - DNA, 23 bp, Artificial Sequence
  Made in the lab
aagccatgtaatggtaacttgga

SEQ ID NO: 4447 - DNA, 24 bp, Artificial Sequence
  Made in the lab
caagccatgtaatggtaacttgga

SEQ ID NO: 4448 - DNA, 25 bp, Artificial Sequence
  Made in the lab
ccaagccatgtaatggtaacttgga

SEQ ID NO: 4449 - DNA, 26 bp, Artificial Sequence
  Made in the lab
accaagccatgtaatggtaacttgga

SEQ ID NO: 4450 - DNA, 27 bp, Artificial Sequence
  Made in the lab
taccaagccatgtaatggtaacttgga

SEQ ID NO: 4451 - DNA, 28 bp, Artificial Sequence
  Made in the lab
gtaccaagccatgtaatggtaacttgga

SEQ ID NO: 4452 - DNA, 29 bp, Artificial Sequence
  Made in the lab
agtaccaagccatgtaatggtaacttgga

SEQ ID NO: 4453 - DNA, 30 bp, Artificial Sequence
  Made in the lab
gagtaccaagccatgtaatggtaacttgga

SEQ ID NO: 4454 - DNA, 21 bp, Artificial Sequence
  Made in the lab
agtgtaaaccgcatggatggg

SEQ ID NO: 4455 - DNA, 22 bp, Artificial Sequence
  Made in the lab
aagtgtaaaccgcatggatggg

SEQ ID NO: 4456 - DNA, 23 bp, Artificial Sequence
  Made in the lab
aaagtgtaaaccgcatggatggg

SEQ ID NO: 4457 - DNA, 24 bp, Artificial Sequence
  Made in the lab
caaagtgtaaaccgcatggatggg

SEQ ID NO: 4458 - DNA, 25 bp, Artificial Sequence
  Made in the lab
acaaagtgtaaaccgcatggatggg

SEQ ID NO: 4459 - DNA, 26 bp, Artificial Sequence
  Made in the lab
gacaaagtgtaaaccgcatggatggg

SEQ ID NO: 4460 - DNA, 27 bp, Artificial Sequence
  Made in the lab
tgacaaagtgtaaaccgcatggatggg

SEQ ID NO: 4461 - DNA, 28 bp, Artificial Sequence
  Made in the lab
ttgacaaagtgtaaaccgcatggatggg

SEQ ID NO: 4462 - DNA, 29 bp, Artificial Sequence
  Made in the lab
cttgacaaagtgtaaaccgcatggatggg

SEQ ID NO: 4463 - DNA, 30 bp, Artificial Sequence
  Made in the lab
ccttgacaaagtgtaaaccgcatggatggg

SEQ ID NO: 4464 - DNA, 21 bp, Artificial Sequence
  Made in the lab
cacacttgttacctatgatat

SEQ ID NO: 4465 - DNA, 22 bp, Artificial Sequence
  Made in the lab
acacacttgttacctatgatat

SEQ ID NO: 4466 - DNA, 23 bp, Artificial Sequence
  Made in the lab
aacacacttgttacctatgatat

SEQ ID NO: 4467 - DNA, 24 bp, Artificial Sequence
  Made in the lab
aaacacacttgttacctatgatat

SEQ ID NO: 4468 - DNA, 25 bp, Artificial Sequence
  Made in the lab
taaacacacttgttacctatgatat

SEQ ID NO: 4469 - DNA, 26 bp, Artificial Sequence
  Made in the lab
ataaacacacttgttacctatgatat

SEQ ID NO: 4470 - DNA, 27 bp, Artificial Sequence
  Made in the lab
gataaacacacttgttacctatgatat

SEQ ID NO: 4471 - DNA, 28 bp, Artificial Sequence
  Made in the lab
ggataaacacacttgttacctatgatat

SEQ ID NO: 4472 - DNA, 29 bp, Artificial Sequence
  Made in the lab
gggataaacacacttgttacctatgatat

SEQ ID NO: 4473 - DNA, 30 bp, Artificial Sequence
  Made in the lab
agggataaacacacttgttacctatgatat

SEQ ID NO: 4474 - DNA, 21 bp, Artificial Sequence
  Made in the lab
atgattttgctagtacagttc

SEQ ID NO: 4475 - DNA, 22 bp, Artificial Sequence
  Made in the lab
aatgattttgctagtacagttc

SEQ ID NO: 4476 - DNA, 23 bp, Artificial Sequence
  Made in the lab
aaatgattttgctagtacagttc

SEQ ID NO: 4477 - DNA, 24 bp, Artificial Sequence
  Made in the lab
taaatgattttgctagtacagttc

SEQ ID NO: 4478 - DNA, 25 bp, Artificial Sequence
  Made in the lab
ttaaatgattttgctagtacagttc

SEQ ID NO: 4479 - DNA, 26 bp, Artificial Sequence
  Made in the lab
gttaaatgattttgctagtacagttc

SEQ ID NO: 4480 - DNA, 27 bp, Artificial Sequence
  Made in the lab
ggttaaatgattttgctagtacagttc

SEQ ID NO: 4481 - DNA, 28 bp, Artificial Sequence
  Made in the lab
cggttaaatgattttgctagtacagttc

SEQ ID NO: 4482 - DNA, 29 bp, Artificial Sequence
  Made in the lab
acggttaaatgattttgctagtacagttc

SEQ ID NO: 4483 - DNA, 30 bp, Artificial Sequence
  Made in the lab
gacggttaaatgattttgctagtacagttc

SEQ ID NO: 4484 - DNA, 21 bp, Artificial Sequence
  Made in the lab
atgaactgggaatctccactc

SEQ ID NO: 4485 - DNA, 22 bp, Artificial Sequence
  Made in the lab
aatgaactgggaatctccactc

SEQ ID NO: 4486 - DNA, 23 bp, Artificial Sequence
  Made in the lab
aaatgaactgggaatctccactc

SEQ ID NO: 4487 - DNA, 24 bp, Artificial Sequence
  Made in the lab
taaatgaactgggaatctccactc

SEQ ID NO: 4488 - DNA, 25 bp, Artificial Sequence
  Made in the lab
ttaaatgaactgggaatctccactc

SEQ ID NO: 4489 - DNA, 26 bp, Artificial Sequence
  Made in the lab
tttaaatgaactgggaatctccactc

SEQ ID NO: 4490 - DNA, 27 bp, Artificial Sequence
  Made in the lab
ctttaaatgaactgggaatctccactc

SEQ ID NO: 4491 - DNA, 28 bp, Artificial Sequence
  Made in the lab
actttaaatgaactgggaatctccactc

SEQ ID NO: 4492 - DNA, 29 bp, Artificial Sequence
  Made in the lab
aactttaaatgaactgggaatctccactc

SEQ ID NO: 4493 - DNA, 30 bp, Artificial Sequence
  Made in the lab
caactttaaatgaactgggaatctccactc

SEQ ID NO: 4494 - DNA, 21 bp, Artificial Sequence
  Made in the lab
tgcagacggttaaatgatttt

SEQ ID NO: 4495 - DNA, 22 bp, Artificial Sequence
  Made in the lab
atgcagacggttaaatgatttt

SEQ ID NO: 4496 - DNA, 23 bp, Artificial Sequence
  Made in the lab
catgcagacggttaaatgatttt

SEQ ID NO: 4497 - DNA, 24 bp, Artificial Sequence
  Made in the lab
gcatgcagacggttaaatgatttt

SEQ ID NO: 4498 - DNA, 25 bp, Artificial Sequence
  Made in the lab
ggcatgcagacggttaaatgatttt

SEQ ID NO: 4499 - DNA, 26 bp, Artificial Sequence
  Made in the lab
gggcatgcagacggttaaatgatttt

SEQ ID NO: 4500 - DNA, 27 bp, Artificial Sequence
  Made in the lab
cgggcatgcagacggttaaatgatttt

SEQ ID NO: 4501 - DNA, 28 bp, Artificial Sequence
  Made in the lab
gcgggcatgcagacggttaaatgatttt

SEQ ID NO: 4502 - DNA, 29 bp, Artificial Sequence
  Made in the lab
tgcgggcatgcagacggttaaatgatttt

SEQ ID NO: 4503 - DNA, 30 bp, Artificial Sequence
  Made in the lab
ttgcgggcatgcagacggttaaatgatttt

SEQ ID NO: 4504 - DNA, 21 bp, Artificial Sequence
  Made in the lab
cttcaacaagccagatataga

SEQ ID NO: 4505 - DNA, 22 bp, Artificial Sequence
  Made in the lab
acttcaacaagccagatataga

SEQ ID NO: 4506 - DNA, 23 bp, Artificial Sequence
  Made in the lab
tacttcaacaagccagatataga

SEQ ID NO: 4507 - DNA, 24 bp, Artificial Sequence
  Made in the lab
atacttcaacaagccagatataga

SEQ ID NO: 4508 - DNA, 25 bp, Artificial Sequence
  Made in the lab
catacttcaacaagccagatataga

SEQ ID NO: 4509 - DNA, 26 bp, Artificial Sequence
  Made in the lab
acatacttcaacaagccagatataga

SEQ ID NO: 4510 - DNA, 27 bp, Artificial Sequence
  Made in the lab
aacatacttcaacaagccagatataga

SEQ ID NO: 4511 - DNA, 28 bp, Artificial Sequence
  Made in the lab
taacatacttcaacaagccagatataga

SEQ ID NO: 4512 - DNA, 29 bp, Artificial Sequence
  Made in the lab
gtaacatacttcaacaagccagatataga

SEQ ID NO: 4513 - DNA, 30 bp, Artificial Sequence
  Made in the lab
ggtaacatacttcaacaagccagatataga

SEQ ID NO: 4514 - DNA, 21 bp, Artificial Sequence
  Made in the lab
ccaagccatgtaatggtaact

SEQ ID NO: 4515 - DNA, 22 bp, Artificial Sequence
  Made in the lab
accaagccatgtaatggtaact

SEQ ID NO: 4516 - DNA, 23 bp, Artificial Sequence
  Made in the lab
taccaagccatgtaatggtaact

SEQ ID NO: 4517 - DNA, 24 bp, Artificial Sequence
  Made in the lab
gtaccaagccatgtaatggtaact

SEQ ID NO: 4518 - DNA, 25 bp, Artificial Sequence
  Made in the lab
agtaccaagccatgtaatggtaact

SEQ ID NO: 4519 - DNA, 26 bp, Artificial Sequence
  Made in the lab
gagtaccaagccatgtaatggtaact

SEQ ID NO: 4520 - DNA, 27 bp, Artificial Sequence
  Made in the lab
tgagtaccaagccatgtaatggtaact

SEQ ID NO: 4521 - DNA, 28 bp, Artificial Sequence
  Made in the lab
ttgagtaccaagccatgtaatggtaact

SEQ ID NO: 4522 - DNA, 29 bp, Artificial Sequence
  Made in the lab
attgagtaccaagccatgtaatggtaact

SEQ ID NO: 4523 - DNA, 30 bp, Artificial Sequence
  Made in the lab
tattgagtaccaagccatgtaatggtaact

SEQ ID NO: 4524 - DNA, 21 bp, Artificial Sequence
  Made in the lab
ggaactgggccttgacaaagt

SEQ ID NO: 4525 - DNA, 22 bp, Artificial Sequence
  Made in the lab
aggaactgggccttgacaaagt

SEQ ID NO: 4526 - DNA, 23 bp, Artificial Sequence
  Made in the lab
gaggaactgggccttgacaaagt

SEQ ID NO: 4527 - DNA, 24 bp, Artificial Sequence
  Made in the lab
ggaggaactgggccttgacaaagt

SEQ ID NO: 4528 - DNA, 25 bp, Artificial Sequence
  Made in the lab
cggaggaactgggccttgacaaagt

SEQ ID NO: 4529 - DNA, 26 bp, Artificial Sequence
  Made in the lab
ccggaggaactgggccttgacaaagt

SEQ ID NO: 4530 - DNA, 27 bp, Artificial Sequence
  Made in the lab
tccggaggaactgggccttgacaaagt

SEQ ID NO: 4531 - DNA, 28 bp, Artificial Sequence
  Made in the lab
ctccggaggaactgggccttgacaaagt

SEQ ID NO: 4532 - DNA, 29 bp, Artificial Sequence
  Made in the lab
actccggaggaactgggccttgacaaagt

SEQ ID NO: 4533 - DNA, 30 bp, Artificial Sequence
  Made in the lab
cactccggaggaactgggccttgacaaagt

SEQ ID NO: 4534 - DNA, 21 bp, Artificial Sequence
  Made in the lab
gagccttgattgaagatatat

SEQ ID NO: 4535 - DNA, 22 bp, Artificial Sequence
  Made in the lab
agagccttgattgaagatatat

SEQ ID NO: 4536 - DNA, 23 bp, Artificial Sequence
  Made in the lab
aagagccttgattgaagatatat

SEQ ID NO: 4537 - DNA, 24 bp, Artificial Sequence
  Made in the lab
caagagccttgattgaagatatat

SEQ ID NO: 4538 - DNA, 25 bp, Artificial Sequence
  Made in the lab
acaagagccttgattgaagatatat

SEQ ID NO: 4539 - DNA, 26 bp, Artificial Sequence
  Made in the lab
cacaagagccttgattgaagatatat

SEQ ID NO: 4540 - DNA, 27 bp, Artificial Sequence
  Made in the lab
gcacaagagccttgattgaagatatat

SEQ ID NO: 4541 - DNA, 28 bp, Artificial Sequence
  Made in the lab
tgcacaagagccttgattgaagatatat

SEQ ID NO: 4542 - DNA, 29 bp, Artificial Sequence
  Made in the lab
ctgcacaagagccttgattgaagatatat

SEQ ID NO: 4543 - DNA, 30 bp, Artificial Sequence
  Made in the lab
gctgcacaagagccttgattgaagatatat

SEQ ID NO: 4544 - DNA, 21 bp, Artificial Sequence
  Made in the lab
ggtcaagatgtactgctattt

SEQ ID NO: 4545 - DNA, 22 bp, Artificial Sequence
  Made in the lab
aggtcaagatgtactgctattt

SEQ ID NO: 4546 - DNA, 23 bp, Artificial Sequence
  Made in the lab
aaggtcaagatgtactgctattt

SEQ ID NO: 4547 - DNA, 24 bp, Artificial Sequence
  Made in the lab
gaaggtcaagatgtactgctattt

SEQ ID NO: 4548 - DNA, 25 bp, Artificial Sequence
  Made in the lab
agaaggtcaagatgtactgctattt

SEQ ID NO: 4549 - DNA, 26 bp, Artificial Sequence
  Made in the lab
aagaaggtcaagatgtactgctattt

SEQ ID NO: 4550 - DNA, 27 bp, Artificial Sequence
  Made in the lab
caagaaggtcaagatgtactgctattt

SEQ ID NO: 4551 - DNA, 28 bp, Artificial Sequence
  Made in the lab
ccaagaaggtcaagatgtactgctattt

SEQ ID NO: 4552 - DNA, 29 bp, Artificial Sequence
  Made in the lab
accaagaaggtcaagatgtactgctattt

SEQ ID NO: 4553 - DNA, 30 bp, Artificial Sequence
  Made in the lab
gaccaagaaggtcaagatgtactgctattt

SEQ ID NO: 4554 - DNA, 21 bp, Artificial Sequence
  Made in the lab
gatcctgcaggactacaaatc

SEQ ID NO: 4555 - DNA, 22 bp, Artificial Sequence
  Made in the lab
agatcctgcaggactacaaatc

SEQ ID NO: 4556 - DNA, 23 bp, Artificial Sequence
  Made in the lab
aagatcctgcaggactacaaatc

SEQ ID NO: 4557 - DNA, 24 bp, Artificial Sequence
  Made in the lab
aaagatcctgcaggactacaaatc

SEQ ID NO: 4558 - DNA, 25 bp, Artificial Sequence
  Made in the lab
aaaagatcctgcaggactacaaatc

SEQ ID NO: 4559 - DNA, 26 bp, Artificial Sequence
  Made in the lab
caaaagatcctgcaggactacaaatc

SEQ ID NO: 4560 - DNA, 27 bp, Artificial Sequence
  Made in the lab
gcaaaagatcctgcaggactacaaatc

SEQ ID NO: 4561 - DNA, 28 bp, Artificial Sequence
  Made in the lab
tgcaaaagatcctgcaggactacaaatc

SEQ ID NO: 4562 - DNA, 29 bp, Artificial Sequence
  Made in the lab
gtgcaaaagatcctgcaggactacaaatc

SEQ ID NO: 4563 - DNA, 30 bp, Artificial Sequence
  Made in the lab
ggtgcaaaagatcctgcaggactacaaatc

SEQ ID NO: 4564 - DNA, 21 bp, Artificial Sequence
  Made in the lab
cccaaaaagcttcatttttct

SEQ ID NO: 4565 - DNA, 22 bp, Artificial Sequence
  Made in the lab
acccaaaaagcttcatttttct

SEQ ID NO: 4566 - DNA, 23 bp, Artificial Sequence
  Made in the lab
aacccaaaaagcttcatttttct

SEQ ID NO: 4567 - DNA, 24 bp, Artificial Sequence
  Made in the lab
taacccaaaaagcttcatttttct

SEQ ID NO: 4568 - DNA, 25 bp, Artificial Sequence
  Made in the lab
ctaacccaaaaagcttcatttttct

SEQ ID NO: 4569 - DNA, 26 bp, Artificial Sequence
  Made in the lab
cctaacccaaaaagcttcatttttct

SEQ ID NO: 4570 - DNA, 27 bp, Artificial Sequence
  Made in the lab
ccctaacccaaaaagcttcatttttct

SEQ ID NO: 4571 - DNA, 28 bp, Artificial Sequence
  Made in the lab
cccctaacccaaaaagcttcatttttct

SEQ ID NO: 4572 - DNA, 29 bp, Artificial Sequence
  Made in the lab
gcccctaacccaaaaagcttcatttttct

SEQ ID NO: 4573 - DNA, 30 bp, Artificial Sequence
  Made in the lab
tgcccctaacccaaaaagcttcatttttct

SEQ ID NO: 4574 - DNA, 21 bp, Artificial Sequence
  Made in the lab
atgagtgttgagcaggaaatt

SEQ ID NO: 4575 - DNA, 22 bp, Artificial Sequence
  Made in the lab
aatgagtgttgagcaggaaatt

SEQ ID NO: 4576 - DNA, 23 bp, Artificial Sequence
  Made in the lab
aaatgagtgttgagcaggaaatt

SEQ ID NO: 4577 - DNA, 24 bp, Artificial Sequence
  Made in the lab
gaaatgagtgttgagcaggaaatt

SEQ ID NO: 4578 - DNA, 25 bp, Artificial Sequence
  Made in the lab
ggaaatgagtgttgagcaggaaatt

SEQ ID NO: 4579 - DNA, 26 bp, Artificial Sequence
  Made in the lab
tggaaatgagtgttgagcaggaaatt

SEQ ID NO: 4580 - DNA, 27 bp, Artificial Sequence
  Made in the lab
atggaaatgagtgttgagcaggaaatt

SEQ ID NO: 4581 - DNA, 28 bp, Artificial Sequence
  Made in the lab
catggaaatgagtgttgagcaggaaatt

SEQ ID NO: 4582 - DNA, 29 bp, Artificial Sequence
  Made in the lab
tcatggaaatgagtgttgagcaggaaatt

SEQ ID NO: 4583 - DNA, 30 bp, Artificial Sequence
  Made in the lab
ttcatggaaatgagtgttgagcaggaaatt

SEQ ID NO: 4584 - DNA, 21 bp, Artificial Sequence
  Made in the lab
tgagtgttgagcaggaaattc

SEQ ID NO: 4585 - DNA, 22 bp, Artificial Sequence
  Made in the lab
atgagtgttgagcaggaaattc

SEQ ID NO: 4586 - DNA, 23 bp, Artificial Sequence
  Made in the lab
aatgagtgttgagcaggaaattc

SEQ ID NO: 4587 - DNA, 24 bp, Artificial Sequence
  Made in the lab
aaatgagtgttgagcaggaaattc

SEQ ID NO: 4588 - DNA, 25 bp, Artificial Sequence
  Made in the lab
gaaatgagtgttgagcaggaaattc

SEQ ID NO: 4589 - DNA, 26 bp, Artificial Sequence
  Made in the lab
ggaaatgagtgttgagcaggaaattc

SEQ ID NO: 4590 - DNA, 27 bp, Artificial Sequence
  Made in the lab
tggaaatgagtgttgagcaggaaattc

SEQ ID NO: 4591 - DNA, 28 bp, Artificial Sequence
  Made in the lab
atggaaatgagtgttgagcaggaaattc

SEQ ID NO: 4592 - DNA, 29 bp, Artificial Sequence
  Made in the lab
catggaaatgagtgttgagcaggaaattc

SEQ ID NO: 4593 - DNA, 30 bp, Artificial Sequence
  Made in the lab
tcatggaaatgagtgttgagcaggaaattc

SEQ ID NO: 4594 - DNA, 21 bp, Artificial Sequence
  Made in the lab
gactgtactgatcatggagtt

SEQ ID NO: 4595 - DNA, 22 bp, Artificial Sequence
  Made in the lab
agactgtactgatcatggagtt

SEQ ID NO: 4596 - DNA, 23 bp, Artificial Sequence
  Made in the lab
aagactgtactgatcatggagtt

SEQ ID NO: 4597 - DNA, 24 bp, Artificial Sequence
  Made in the lab
caagactgtactgatcatggagtt

SEQ ID NO: 4598 - DNA, 25 bp, Artificial Sequence
  Made in the lab
gcaagactgtactgatcatggagtt

SEQ ID NO: 4599 - DNA, 26 bp, Artificial Sequence
  Made in the lab
ggcaagactgtactgatcatggagtt

SEQ ID NO: 4600 - DNA, 27 bp, Artificial Sequence
  Made in the lab
tggcaagactgtactgatcatggagtt

SEQ ID NO: 4601 - DNA, 28 bp, Artificial Sequence
  Made in the lab
ttggcaagactgtactgatcatggagtt

SEQ ID NO: 4602 - DNA, 29 bp, Artificial Sequence
  Made in the lab
gttggcaagactgtactgatcatggagtt

SEQ ID NO: 4603 - DNA, 30 bp, Artificial Sequence
  Made in the lab
agttggcaagactgtactgatcatggagtt

SEQ ID NO: 4604 - DNA, 21 bp, Artificial Sequence
  Made in the lab
gaggtcccatcaaaaccaaac

SEQ ID NO: 4605 - DNA, 22 bp, Artificial Sequence
  Made in the lab
agaggtcccatcaaaaccaaac

SEQ ID NO: 4606 - DNA, 23 bp, Artificial Sequence
  Made in the lab
aagaggtcccatcaaaaccaaac

SEQ ID NO: 4607 - DNA, 24 bp, Artificial Sequence
  Made in the lab
aaagaggtcccatcaaaaccaaac

SEQ ID NO: 4608 - DNA, 25 bp, Artificial Sequence
  Made in the lab
gaaagaggtcccatcaaaaccaaac

SEQ ID NO: 4609 - DNA, 26 bp, Artificial Sequence
  Made in the lab
tgaaagaggtcccatcaaaaccaaac

SEQ ID NO: 4610 - DNA, 27 bp, Artificial Sequence
  Made in the lab
atgaaagaggtcccatcaaaaccaaac

SEQ ID NO: 4611 - DNA, 28 bp, Artificial Sequence
  Made in the lab
gatgaaagaggtcccatcaaaaccaaac

SEQ ID NO: 4612 - DNA, 29 bp, Artificial Sequence
  Made in the lab
tgatgaaagaggtcccatcaaaaccaaac

SEQ ID NO: 4613 - DNA, 30 bp, Artificial Sequence
  Made in the lab
ttgatgaaagaggtcccatcaaaaccaaac

SEQ ID NO: 4614 - DNA, 21 bp, Artificial Sequence
  Made in the lab
gggtggcaaaattgggctttt

SEQ ID NO: 4615 - DNA, 22 bp, Artificial Sequence
  Made in the lab
agggtggcaaaattgggctttt

SEQ ID NO: 4616 - DNA, 23 bp, Artificial Sequence
  Made in the lab
aagggtggcaaaattgggctttt

SEQ ID NO: 4617 - DNA, 24 bp, Artificial Sequence
  Made in the lab
caagggtggcaaaattgggctttt

SEQ ID NO: 4618 - DNA, 25 bp, Artificial Sequence
  Made in the lab
ccaagggtggcaaaattgggctttt

SEQ ID NO: 4619 - DNA, 26 bp, Artificial Sequence
  Made in the lab
gccaagggtggcaaaattgggctttt

SEQ ID NO: 4620 - DNA, 27 bp, Artificial Sequence
  Made in the lab
tgccaagggtggcaaaattgggctttt

SEQ ID NO: 4621 - DNA, 28 bp, Artificial Sequence
  Made in the lab
atgccaagggtggcaaaattgggctttt

SEQ ID NO: 4622 - DNA, 29 bp, Artificial Sequence
  Made in the lab
tatgccaagggtggcaaaattgggctttt

SEQ ID NO: 4623 - DNA, 30 bp, Artificial Sequence
  Made in the lab
ctatgccaagggtggcaaaattgggctttt

SEQ ID NO: 4624 - DNA, 21 bp, Artificial Sequence
  Made in the lab
ggtagcgctggtatatggtca

SEQ ID NO: 4625 - DNA, 22 bp, Artificial Sequence
  Made in the lab
aggtagcgctggtatatggtca

SEQ ID NO: 4626 - DNA, 23 bp, Artificial Sequence
  Made in the lab
aaggtagcgctggtatatggtca

SEQ ID NO: 4627 - DNA, 24 bp, Artificial Sequence
  Made in the lab
taaggtagcgctggtatatggtca

SEQ ID NO: 4628 - DNA, 25 bp, Artificial Sequence
  Made in the lab
ctaaggtagcgctggtatatggtca

SEQ ID NO: 4629 - DNA, 26 bp, Artificial Sequence
  Made in the lab
tctaaggtagcgctggtatatggtca

SEQ ID NO: 4630 - DNA, 27 bp, Artificial Sequence
  Made in the lab
ctctaaggtagcgctggtatatggtca

SEQ ID NO: 4631 - DNA, 28 bp, Artificial Sequence
  Made in the lab
cctctaaggtagcgctggtatatggtca

SEQ ID NO: 4632 - DNA, 29 bp, Artificial Sequence
  Made in the lab
acctctaaggtagcgctggtatatggtca

SEQ ID NO: 4633 - DNA, 30 bp, Artificial Sequence
  Made in the lab
cacctctaaggtagcgctggtatatggtca

SEQ ID NO: 4634 - DNA, 21 bp, Artificial Sequence
  Made in the lab
tcccttctgctgtgggctatc

SEQ ID NO: 4635 - DNA, 22 bp, Artificial Sequence
  Made in the lab
atcccttctgctgtgggctatc

SEQ ID NO: 4636 - DNA, 23 bp, Artificial Sequence
  Made in the lab
aatcccttctgctgtgggctatc

SEQ ID NO: 4637 - DNA, 24 bp, Artificial Sequence
  Made in the lab
gaatcccttctgctgtgggctatc

SEQ ID NO: 4638 - DNA, 25 bp, Artificial Sequence
  Made in the lab
cgaatcccttctgctgtgggctatc

SEQ ID NO: 4639 - DNA, 26 bp, Artificial Sequence
  Made in the lab
ccgaatcccttctgctgtgggctatc

SEQ ID NO: 4640 - DNA, 27 bp, Artificial Sequence
  Made in the lab
gccgaatcccttctgctgtgggctatc

SEQ ID NO: 4641 - DNA, 28 bp, Artificial Sequence
  Made in the lab
ggccgaatcccttctgctgtgggctatc

SEQ ID NO: 4642 - DNA, 29 bp, Artificial Sequence
  Made in the lab
gggccgaatcccttctgctgtgggctatc

SEQ ID NO: 4643 - DNA, 30 bp, Artificial Sequence
  Made in the lab
tgggccgaatcccttctgctgtgggctatc

SEQ ID NO: 4644 - DNA, 21 bp, Artificial Sequence
  Made in the lab
ggcagggagaccagactggtt

SEQ ID NO: 4645 - DNA, 22 bp, Artificial Sequence
  Made in the lab
aggcagggagaccagactggtt

SEQ ID NO: 4646 - DNA, 23 bp, Artificial Sequence
  Made in the lab
aaggcagggagaccagactggtt

SEQ ID NO: 4647 - DNA, 24 bp, Artificial Sequence
  Made in the lab
caaggcagggagaccagactggtt

SEQ ID NO: 4648 - DNA, 25 bp, Artificial Sequence
  Made in the lab
gcaaggcagggagaccagactggtt

SEQ ID NO: 4649 - DNA, 26 bp, Artificial Sequence
  Made in the lab
tgcaaggcagggagaccagactggtt

SEQ ID NO: 4650 - DNA, 27 bp, Artificial Sequence
  Made in the lab
gtgcaaggcagggagaccagactggtt

SEQ ID NO: 4651 - DNA, 28 bp, Artificial Sequence
  Made in the lab
agtgcaaggcagggagaccagactggtt

SEQ ID NO: 4652 - DNA, 29 bp, Artificial Sequence
  Made in the lab
aagtgcaaggcagggagaccagactggtt

SEQ ID NO: 4653 - DNA, 30 bp, Artificial Sequence
  Made in the lab
gaagtgcaaggcagggagaccagactggtt

SEQ ID NO: 4654 - DNA, 21 bp, Artificial Sequence
  Made in the lab
gcgctggtatatggtcaaatg

SEQ ID NO: 4655 - DNA, 22 bp, Artificial Sequence
  Made in the lab
agcgctggtatatggtcaaatg

SEQ ID NO: 4656 - DNA, 23 bp, Artificial Sequence
  Made in the lab
tagcgctggtatatggtcaaatg

SEQ ID NO: 4657 - DNA, 24 bp, Artificial Sequence
  Made in the lab
gtagcgctggtatatggtcaaatg

SEQ ID NO: 4658 - DNA, 25 bp, Artificial Sequence
  Made in the lab
ggtagcgctggtatatggtcaaatg

SEQ ID NO: 4659 - DNA, 26 bp, Artificial Sequence
  Made in the lab
aggtagcgctggtatatggtcaaatg

SEQ ID NO: 4660 - DNA, 27 bp, Artificial Sequence
  Made in the lab
aaggtagcgctggtatatggtcaaatg

SEQ ID NO: 4661 - DNA, 28 bp, Artificial Sequence
  Made in the lab
taaggtagcgctggtatatggtcaaatg

SEQ ID NO: 4662 - DNA, 29 bp, Artificial Sequence
  Made in the lab
ctaaggtagcgctggtatatggtcaaatg

SEQ ID NO: 4663 - DNA, 30 bp, Artificial Sequence
  Made in the lab
tctaaggtagcgctggtatatggtcaaatg

SEQ ID NO: 4664 - DNA, 21 bp, Artificial Sequence
  Made in the lab
caagagccttgattgaagata

SEQ ID NO: 4665 - DNA, 22 bp, Artificial Sequence
  Made in the lab
acaagagccttgattgaagata

SEQ ID NO: 4666 - DNA, 23 bp, Artificial Sequence
  Made in the lab
cacaagagccttgattgaagata

SEQ ID NO: 4667 - DNA, 24 bp, Artificial Sequence
  Made in the lab
gcacaagagccttgattgaagata

SEQ ID NO: 4668 - DNA, 25 bp, Artificial Sequence
  Made in the lab
tgcacaagagccttgattgaagata

SEQ ID NO: 4669 - DNA, 26 bp, Artificial Sequence
  Made in the lab
ctgcacaagagccttgattgaagata

SEQ ID NO: 4670 - DNA, 27 bp, Artificial Sequence
  Made in the lab
gctgcacaagagccttgattgaagata

SEQ ID NO: 4671 - DNA, 28 bp, Artificial Sequence
  Made in the lab
ggctgcacaagagccttgattgaagata

SEQ ID NO: 4672 - DNA, 29 bp, Artificial Sequence
  Made in the lab
aggctgcacaagagccttgattgaagata

SEQ ID NO: 4673 - DNA, 30 bp, Artificial Sequence
  Made in the lab
taggctgcacaagagccttgattgaagata

SEQ ID NO: 4674 - DNA, 21 bp, Artificial Sequence
  Made in the lab
ctttgggcagaatcatgaatg

SEQ ID NO: 4675 - DNA, 22 bp, Artificial Sequence
  Made in the lab
actttgggcagaatcatgaatg

SEQ ID NO: 4676 - DNA, 23 bp, Artificial Sequence
  Made in the lab
gactttgggcagaatcatgaatg

SEQ ID NO: 4677 - DNA, 24 bp, Artificial Sequence
  Made in the lab
agactttgggcagaatcatgaatg

SEQ ID NO: 4678 - DNA, 25 bp, Artificial Sequence
  Made in the lab
gagactttgggcagaatcatgaatg

SEQ ID NO: 4679 - DNA, 26 bp, Artificial Sequence
  Made in the lab
tgagactttgggcagaatcatgaatg

SEQ ID NO: 4680 - DNA, 27 bp, Artificial Sequence
  Made in the lab
ctgagactttgggcagaatcatgaatg

SEQ ID NO: 4681 - DNA, 28 bp, Artificial Sequence
  Made in the lab
cctgagactttgggcagaatcatgaatg

SEQ ID NO: 4682 - DNA, 29 bp, Artificial Sequence
  Made in the lab
tcctgagactttgggcagaatcatgaatg

SEQ ID NO: 4683 - DNA, 30 bp, Artificial Sequence
  Made in the lab
gtcctgagactttgggcagaatcatgaatg

SEQ ID NO: 4684 - DNA, 21 bp, Artificial Sequence
  Made in the lab
cctctgtacaggctatctatg

SEQ ID NO: 4685 - DNA, 22 bp, Artificial Sequence
  Made in the lab
acctctgtacaggctatctatg

SEQ ID NO: 4686 - DNA, 23 bp, Artificial Sequence
  Made in the lab
cacctctgtacaggctatctatg

SEQ ID NO: 4687 - DNA, 24 bp, Artificial Sequence
  Made in the lab
tcacctctgtacaggctatctatg

SEQ ID NO: 4688 - DNA, 25 bp, Artificial Sequence
  Made in the lab
atcacctctgtacaggctatctatg

SEQ ID NO: 4689 - DNA, 26 bp, Artificial Sequence
  Made in the lab
tatcacctctgtacaggctatctatg

SEQ ID NO: 4690 - DNA, 27 bp, Artificial Sequence
  Made in the lab
ctatcacctctgtacaggctatctatg

SEQ ID NO: 4691 - DNA, 28 bp, Artificial Sequence
  Made in the lab
tctatcacctctgtacaggctatctatg

SEQ ID NO: 4692 - DNA, 29 bp, Artificial Sequence
  Made in the lab
atctatcacctctgtacaggctatctatg

SEQ ID NO: 4693 - DNA, 30 bp, Artificial Sequence
  Made in the lab
gatctatcacctctgtacaggctatctatg

SEQ ID NO: 4694 - DNA, 21 bp, Artificial Sequence
  Made in the lab
tcatgaatgtcattggagaac

SEQ ID NO: 4695 - DNA, 22 bp, Artificial Sequence
  Made in the lab
atcatgaatgtcattggagaac

SEQ ID NO: 4696 - DNA, 23 bp, Artificial Sequence
  Made in the lab
aatcatgaatgtcattggagaac

SEQ ID NO: 4697 - DNA, 24 bp, Artificial Sequence
  Made in the lab
gaatcatgaatgtcattggagaac

SEQ ID NO: 4698 - DNA, 25 bp, Artificial Sequence
  Made in the lab
agaatcatgaatgtcattggagaac

SEQ ID NO: 4699 - DNA, 26 bp, Artificial Sequence
  Made in the lab
cagaatcatgaatgtcattggagaac

SEQ ID NO: 4700 - DNA, 27 bp, Artificial Sequence
  Made in the lab
gcagaatcatgaatgtcattggagaac

SEQ ID NO: 4701 - DNA, 28 bp, Artificial Sequence
  Made in the lab
ggcagaatcatgaatgtcattggagaac

SEQ ID NO: 4702 - DNA, 29 bp, Artificial Sequence
  Made in the lab
gggcagaatcatgaatgtcattggagaac

SEQ ID NO: 4703 - DNA, 30 bp, Artificial Sequence
  Made in the lab
tgggcagaatcatgaatgtcattggagaac

SEQ ID NO: 4704 - DNA, 21 bp, Artificial Sequence
  Made in the lab
agaattaccactaccaagaag

SEQ ID NO: 4705 - DNA, 22 bp, Artificial Sequence
  Made in the lab
aagaattaccactaccaagaag

SEQ ID NO: 4706 - DNA, 23 bp, Artificial Sequence
  Made in the lab
aaagaattaccactaccaagaag

SEQ ID NO: 4707 - DNA, 24 bp, Artificial Sequence
  Made in the lab
gaaagaattaccactaccaagaag

SEQ ID NO: 4708 - DNA, 25 bp, Artificial Sequence
  Made in the lab
ggaaagaattaccactaccaagaag

SEQ ID NO: 4709 - DNA, 26 bp, Artificial Sequence
  Made in the lab
aggaaagaattaccactaccaagaag

SEQ ID NO: 4710 - DNA, 27 bp, Artificial Sequence
  Made in the lab
caggaaagaattaccactaccaagaag

SEQ ID NO: 4711 - DNA, 28 bp, Artificial Sequence
  Made in the lab
gcaggaaagaattaccactaccaagaag

SEQ ID NO: 4712 - DNA, 29 bp, Artificial Sequence
  Made in the lab
tgcaggaaagaattaccactaccaagaag

SEQ ID NO: 4713 - DNA, 30 bp, Artificial Sequence
  Made in the lab
atgcaggaaagaattaccactaccaagaag

SEQ ID NO: 4714 - DNA, 21 bp, Artificial Sequence
  Made in the lab
agcttcatttttctgtgtagg

SEQ ID NO: 4715 - DNA, 22 bp, Artificial Sequence
  Made in the lab
aagcttcatttttctgtgtagg

SEQ ID NO: 4716 - DNA, 23 bp, Artificial Sequence
  Made in the lab
aaagcttcatttttctgtgtagg

SEQ ID NO: 4717 - DNA, 24 bp, Artificial Sequence
  Made in the lab
aaaagcttcatttttctgtgtagg

SEQ ID NO: 4718 - DNA, 25 bp, Artificial Sequence
  Made in the lab
aaaaagcttcatttttctgtgtagg

SEQ ID NO: 4719 - DNA, 26 bp, Artificial Sequence
  Made in the lab
caaaaagcttcatttttctgtgtagg

SEQ ID NO: 4720 - DNA, 27 bp, Artificial Sequence
  Made in the lab
ccaaaaagcttcatttttctgtgtagg

SEQ ID NO: 4721 - DNA, 28 bp, Artificial Sequence
  Made in the lab
cccaaaaagcttcatttttctgtgtagg

SEQ ID NO: 4722 - DNA, 29 bp, Artificial Sequence
  Made in the lab
acccaaaaagcttcatttttctgtgtagg

SEQ ID NO: 4723 - DNA, 30 bp, Artificial Sequence
  Made in the lab
aacccaaaaagcttcatttttctgtgtagg

SEQ ID NO: 4724 - DNA, 21 bp, Artificial Sequence
  Made in the lab
agaggtcccatcaaaaccaaa

SEQ ID NO: 4725 - DNA, 22 bp, Artificial Sequence
  Made in the lab
aagaggtcccatcaaaaccaaa

SEQ ID NO: 4726 - DNA, 23 bp, Artificial Sequence
  Made in the lab
aaagaggtcccatcaaaaccaaa

SEQ ID NO: 4727 - DNA, 24 bp, Artificial Sequence
  Made in the lab
gaaagaggtcccatcaaaaccaaa

SEQ ID NO: 4728 - DNA, 25 bp, Artificial Sequence
  Made in the lab
tgaaagaggtcccatcaaaaccaaa

SEQ ID NO: 4729 - DNA, 26 bp, Artificial Sequence
  Made in the lab
atgaaagaggtcccatcaaaaccaaa

SEQ ID NO: 4730 - DNA, 27 bp, Artificial Sequence
  Made in the lab
gatgaaagaggtcccatcaaaaccaaa

SEQ ID NO: 4731 - DNA, 28 bp, Artificial Sequence
  Made in the lab
tgatgaaagaggtcccatcaaaaccaaa

SEQ ID NO: 4732 - DNA, 29 bp, Artificial Sequence
  Made in the lab
ttgatgaaagaggtcccatcaaaaccaaa

SEQ ID NO: 4733 - DNA, 30 bp, Artificial Sequence
  Made in the lab
attgatgaaagaggtcccatcaaaaccaaa

SEQ ID NO: 4734 - DNA, 21 bp, Artificial Sequence
  Made in the lab
acatctccttcgccaaaagca

SEQ ID NO: 4735 - DNA, 22 bp, Artificial Sequence
  Made in the lab
aacatctccttcgccaaaagca

SEQ ID NO: 4736 - DNA, 23 bp, Artificial Sequence
  Made in the lab
aaacatctccttcgccaaaagca

SEQ ID NO: 4737 - DNA, 24 bp, Artificial Sequence
  Made in the lab
caaacatctccttcgccaaaagca

SEQ ID NO: 4738 - DNA, 25 bp, Artificial Sequence
  Made in the lab
gcaaacatctccttcgccaaaagca

SEQ ID NO: 4739 - DNA, 26 bp, Artificial Sequence
  Made in the lab
cgcaaacatctccttcgccaaaagca

SEQ ID NO: 4740 - DNA, 27 bp, Artificial Sequence
  Made in the lab
gcgcaaacatctccttcgccaaaagca

SEQ ID NO: 4741 - DNA, 28 bp, Artificial Sequence
  Made in the lab
ggcgcaaacatctccttcgccaaaagca

SEQ ID NO: 4742 - DNA, 29 bp, Artificial Sequence
  Made in the lab
cggcgcaaacatctccttcgccaaaagca

SEQ ID NO: 4743 - DNA, 30 bp, Artificial Sequence
  Made in the lab
gcggcgcaaacatctccttcgccaaaagca

SEQ ID NO: 4744 - DNA, 21 bp, Artificial Sequence
  Made in the lab
gggatctatcacctctgtaca

SEQ ID NO: 4745 - DNA, 22 bp, Artificial Sequence
  Made in the lab
agggatctatcacctctgtaca

SEQ ID NO: 4746 - DNA, 23 bp, Artificial Sequence
  Made in the lab
aagggatctatcacctctgtaca

SEQ ID NO: 4747 - DNA, 24 bp, Artificial Sequence
  Made in the lab
gaagggatctatcacctctgtaca

SEQ ID NO: 4748 - DNA, 25 bp, Artificial Sequence
  Made in the lab
agaagggatctatcacctctgtaca

SEQ ID NO: 4749 - DNA, 26 bp, Artificial Sequence
  Made in the lab
aagaagggatctatcacctctgtaca

SEQ ID NO: 4750 - DNA, 27 bp, Artificial Sequence
  Made in the lab
caagaagggatctatcacctctgtaca

SEQ ID NO: 4751 - DNA, 28 bp, Artificial Sequence
  Made in the lab
ccaagaagggatctatcacctctgtaca

SEQ ID NO: 4752 - DNA, 29 bp, Artificial Sequence
  Made in the lab
accaagaagggatctatcacctctgtaca

SEQ ID NO: 4753 - DNA, 30 bp, Artificial Sequence
  Made in the lab
taccaagaagggatctatcacctctgtaca

SEQ ID NO: 4754 - DNA, 21 bp, Artificial Sequence
  Made in the lab
tacagcgtttcttgtctcagc

SEQ ID NO: 4755 - DNA, 22 bp, Artificial Sequence
  Made in the lab
atacagcgtttcttgtctcagc

SEQ ID NO: 4756 - DNA, 23 bp, Artificial Sequence
  Made in the lab
aatacagcgtttcttgtctcagc

SEQ ID NO: 4757 - DNA, 24 bp, Artificial Sequence
  Made in the lab
aaatacagcgtttcttgtctcagc

SEQ ID NO: 4758 - DNA, 25 bp, Artificial Sequence
  Made in the lab
aaaatacagcgtttcttgtctcagc

SEQ ID NO: 4759 - DNA, 26 bp, Artificial Sequence
  Made in the lab
gaaaatacagcgtttcttgtctcagc

SEQ ID NO: 4760 - DNA, 27 bp, Artificial Sequence
  Made in the lab
ggaaaatacagcgtttcttgtctcagc

SEQ ID NO: 4761 - DNA, 28 bp, Artificial Sequence
  Made in the lab
cggaaaatacagcgtttcttgtctcagc

SEQ ID NO: 4762 - DNA, 29 bp, Artificial Sequence
  Made in the lab
acggaaaatacagcgtttcttgtctcagc

SEQ ID NO: 4763 - DNA, 30 bp, Artificial Sequence
  Made in the lab
cacggaaaatacagcgtttcttgtctcagc

SEQ ID NO: 4764 - DNA, 21 bp, Artificial Sequence
  Made in the lab
ggcttggttagaggccagaaa

SEQ ID NO: 4765 - DNA, 22 bp, Artificial Sequence
  Made in the lab
aggcttggttagaggccagaaa

SEQ ID NO: 4766 - DNA, 23 bp, Artificial Sequence
  Made in the lab
aaggcttggttagaggccagaaa

SEQ ID NO: 4767 - DNA, 24 bp, Artificial Sequence
  Made in the lab
gaaggcttggttagaggccagaaa

SEQ ID NO: 4768 - DNA, 25 bp, Artificial Sequence
  Made in the lab
agaaggcttggttagaggccagaaa

SEQ ID NO: 4769 - DNA, 26 bp, Artificial Sequence
  Made in the lab
cagaaggcttggttagaggccagaaa

SEQ ID NO: 4770 - DNA, 27 bp, Artificial Sequence
  Made in the lab
acagaaggcttggttagaggccagaaa

SEQ ID NO: 4771 - DNA, 28 bp, Artificial Sequence
  Made in the lab
tacagaaggcttggttagaggccagaaa

SEQ ID NO: 4772 - DNA, 29 bp, Artificial Sequence
  Made in the lab
gtacagaaggcttggttagaggccagaaa

SEQ ID NO: 4773 - DNA, 30 bp, Artificial Sequence
  Made in the lab
ggtacagaaggcttggttagaggccagaaa

SEQ ID NO: 4774 - DNA, 21 bp, Artificial Sequence
  Made in the lab
agcccatggtggttactctgt

SEQ ID NO: 4775 - DNA, 22 bp, Artificial Sequence
  Made in the lab
aagcccatggtggttactctgt

SEQ ID NO: 4776 - DNA, 23 bp, Artificial Sequence
  Made in the lab
aaagcccatggtggttactctgt

SEQ ID NO: 4777 - DNA, 24 bp, Artificial Sequence
  Made in the lab
caaagcccatggtggttactctgt

SEQ ID NO: 4778 - DNA, 25 bp, Artificial Sequence
  Made in the lab
ccaaagcccatggtggttactctgt

SEQ ID NO: 4779 - DNA, 26 bp, Artificial Sequence
  Made in the lab
gccaaagcccatggtggttactctgt

SEQ ID NO: 4780 - DNA, 27 bp, Artificial Sequence
  Made in the lab
cgccaaagcccatggtggttactctgt

SEQ ID NO: 4781 - DNA, 28 bp, Artificial Sequence
  Made in the lab
tcgccaaagcccatggtggttactctgt

SEQ ID NO: 4782 - DNA, 29 bp, Artificial Sequence
  Made in the lab
gtcgccaaagcccatggtggttactctgt

SEQ ID NO: 4783 - DNA, 30 bp, Artificial Sequence
  Made in the lab
tgtcgccaaagcccatggtggttactctgt

SEQ ID NO: 4784 - DNA, 21 bp, Artificial Sequence
  Made in the lab
gtgcaaggcagggagaccaga

SEQ ID NO: 4785 - DNA, 22 bp, Artificial Sequence
  Made in the lab
agtgcaaggcagggagaccaga

SEQ ID NO: 4786 - DNA, 23 bp, Artificial Sequence
  Made in the lab
aagtgcaaggcagggagaccaga

SEQ ID NO: 4787 - DNA, 24 bp, Artificial Sequence
  Made in the lab
gaagtgcaaggcagggagaccaga

SEQ ID NO: 4788 - DNA, 25 bp, Artificial Sequence
  Made in the lab
ggaagtgcaaggcagggagaccaga

SEQ ID NO: 4789 - DNA, 26 bp, Artificial Sequence
  Made in the lab
tggaagtgcaaggcagggagaccaga

SEQ ID NO: 4790 - DNA, 27 bp, Artificial Sequence
  Made in the lab
ctggaagtgcaaggcagggagaccaga

SEQ ID NO: 4791 - DNA, 28 bp, Artificial Sequence
  Made in the lab
cctggaagtgcaaggcagggagaccaga

SEQ ID NO: 4792 - DNA, 29 bp, Artificial Sequence
  Made in the lab
ccctggaagtgcaaggcagggagaccaga

SEQ ID NO: 4793 - DNA, 30 bp, Artificial Sequence
  Made in the lab
gccctggaagtgcaaggcagggagaccaga

SEQ ID NO: 4794 - DNA, 21 bp, Artificial Sequence
  Made in the lab
tcacctctgtacaggctatct

SEQ ID NO: 4795 - DNA, 22 bp, Artificial Sequence
  Made in the lab
atcacctctgtacaggctatct

SEQ ID NO: 4796 - DNA, 23 bp, Artificial Sequence
  Made in the lab
tatcacctctgtacaggctatct

SEQ ID NO: 4797 - DNA, 24 bp, Artificial Sequence
  Made in the lab
ctatcacctctgtacaggctatct

SEQ ID NO: 4798 - DNA, 25 bp, Artificial Sequence
  Made in the lab
tctatcacctctgtacaggctatct

SEQ ID NO: 4799 - DNA, 26 bp, Artificial Sequence
  Made in the lab
atctatcacctctgtacaggctatct

SEQ ID NO: 4800 - DNA, 27 bp, Artificial Sequence
  Made in the lab
gatctatcacctctgtacaggctatct

SEQ ID NO: 4801 - DNA, 28 bp, Artificial Sequence
  Made in the lab
ggatctatcacctctgtacaggctatct

SEQ ID NO: 4802 - DNA, 29 bp, Artificial Sequence
  Made in the lab
gggatctatcacctctgtacaggctatct

SEQ ID NO: 4803 - DNA, 30 bp, Artificial Sequence
  Made in the lab
agggatctatcacctctgtacaggctatct

SEQ ID NO: 4804 - DNA, 25 bp, Artificial Sequence
  Made in the lab
agcagagggaattcatctctcaggc

SEQ ID NO: 4805 - DNA, 25 bp, Artificial Sequence
  Made in the lab
gggaaatgtctcctcccattgattt

SEQ ID NO: 4806 - DNA, 25 bp, Artificial Sequence
  Made in the lab
atcagtggatgtgttgccagttccc

SEQ ID NO: 4807 - DNA, 25 bp, Artificial Sequence
  Made in the lab
tgcacctgatcatagagtgtgctgc

SEQ ID NO: 4808 - DNA, 25 bp, Artificial Sequence
  Made in the lab
tctcatggaagactgctgaccttcc

SEQ ID NO: 4809 - DNA, 25 bp, Artificial Sequence
  Made in the lab
tttgccagacatcaggatgaaaggc

SEQ ID NO: 4810 - DNA, 25 bp, Artificial Sequence
  Made in the lab
tcttgaacaagatccgagcgtagcc

SEQ ID NO: 4811 - DNA, 25 bp, Artificial Sequence
  Made in the lab
ttatggagacatgtccctggagctc

SEQ ID NO: 4812 - DNA, 25 bp, Artificial Sequence
  Made in the lab
atactggtcaaccttctgcacttgg

SEQ ID NO: 4813 - DNA, 25 bp, Artificial Sequence
  Made in the lab
aatgagaccaatctcacagttgtgg

SEQ ID NO: 4814 - DNA, 25 bp, Artificial Sequence
  Made in the lab
ttaacaatgatgctgtcgtcacagg

SEQ ID NO: 4815 - DNA, 25 bp, Artificial Sequence
  Made in the lab
attaagacggctttctccctcttgc

SEQ ID NO: 4816 - DNA, 25 bp, Artificial Sequence
  Made in the lab
aaatatgttcacgttacgctggacc

SEQ ID NO: 4817 - DNA, 25 bp, Artificial Sequence
  Made in the lab
tatactctctgccaaatctgctaca

SEQ ID NO: 4818 - DNA, 25 bp, Artificial Sequence
  Made in the lab
aatgtctgtcttcatcttctccgtc

SEQ ID NO: 4819 - DNA, 25 bp, Artificial Sequence
  Made in the lab
tagtagtcatggcacttctcgttcc

SEQ ID NO: 4820 - DNA, 25 bp, Artificial Sequence
  Made in the lab
tagtctctgagatcttaccttccgc

SEQ ID NO: 4821 - DNA, 25 bp, Artificial Sequence
  Made in the lab
aattgtcattgatttcgccacaacc

SEQ ID NO: 4822 - DNA, 25 bp, Artificial Sequence
  Made in the lab
tccacattcagcctgtctgcaatgg

SEQ ID NO: 4823 - DNA, 25 bp, Artificial Sequence
  Made in the lab
tcaagatggcataaactctggtggc

SEQ ID NO: 4824 - DNA, 25 bp, Artificial Sequence
  Made in the lab
atatgatgcagccaccacatgcctc

SEQ ID NO: 4825 - DNA, 25 bp, Artificial Sequence
  Made in the lab
aataccttcaccaaagcaagccacc

SEQ ID NO: 4826 - DNA, 25 bp, Artificial Sequence
  Made in the lab
ttcccaagcatggtacccttatccc

SEQ ID NO: 4827 - DNA, 25 bp, Artificial Sequence
  Made in the lab
ttcaagagaatttgctgcctcgctc

SEQ ID NO: 4828 - DNA, 25 bp, Artificial Sequence
  Made in the lab
tgtctgagaagccaagacacttggc

SEQ ID NO: 4829 - DNA, 25 bp, Artificial Sequence
  Made in the lab
aactgtgtcaatctgtttcactgct

SEQ ID NO: 4830 - DNA, 25 bp, Artificial Sequence
  Made in the lab
aagatctgcttattcagtaactggg

SEQ ID NO: 4831 - DNA, 25 bp, Artificial Sequence
  Made in the lab
tagaagtgcatactagtgagtttgc

SEQ ID NO: 4832 - DNA, 25 bp, Artificial Sequence
  Made in the lab
attcaaagatgtctaaatgccaagg

SEQ ID NO: 4833 - DNA, 25 bp, Artificial Sequence
  Made in the lab
agcagagggaattcatctctcaggc

SEQ ID NO: 4834 - DNA, 25 bp, Artificial Sequence
  Made in the lab
tgtggatcccttgataaaccacagc

SEQ ID NO: 4835 - DNA, 25 bp, Artificial Sequence
  Made in the lab
attcaggtaaatatgtgcatctccc

SEQ ID NO: 4836 - DNA, 25 bp, Artificial Sequence
  Made in the lab
aatatctgaattcattcctgagcgg

SEQ ID NO: 4837 - DNA, 25 bp, Artificial Sequence
  Made in the lab
tttcaaagtcttgcatgatccttgt

SEQ ID NO: 4838 - DNA, 25 bp, Artificial Sequence
  Made in the lab
ttctggcagaagtttatatttctcc

SEQ ID NO: 4839 - DNA, 25 bp, Artificial Sequence
  Made in the lab
ttctgcacgatcttctcacactggg

SEQ ID NO: 4840 - DNA, 25 bp, Artificial Sequence
  Made in the lab
tagccatcaatcaggaagcctttgg

SEQ ID NO: 4841 - DNA, 25 bp, Artificial Sequence
  Made in the lab
aaactcttctccttgctgcacctcc

SEQ ID NO: 4842 - DNA, 25 bp, Artificial Sequence
  Made in the lab
tagctgatctggttcacgatggtgc

SEQ ID NO: 4843 - DNA, 25 bp, Artificial Sequence
  Made in the lab
atgagctgcaaacagagggctcttc

SEQ ID NO: 4844 - DNA, 25 bp, Artificial Sequence
  Made in the lab
tttctatgcaccgaaactgccaagg

SEQ ID NO: 4845 - DNA, 25 bp, Artificial Sequence
  Made in the lab
tttgagtggaactgaacagctgggt

SEQ ID NO: 4846 - DNA, 25 bp, Artificial Sequence
  Made in the lab
tgatgtgtatcctcggtcatacagg

SEQ ID NO: 4847 - DNA, 25 bp, Artificial Sequence
  Made in the lab
tgcaatggtggctacctcatcaggt

SEQ ID NO: 4848 - DNA, 25 bp, Artificial Sequence
  Made in the lab
atagcagcgaactgactggatagcc

SEQ ID NO: 4849 - DNA, 25 bp, Artificial Sequence
  Made in the lab
caattcccaggcatctatatctggc

SEQ ID NO: 4850 - DNA, 25 bp, Artificial Sequence
  Made in the lab
atttaaagttggtctaagttcctgg

SEQ ID NO: 4851 - DNA, 25 bp, Artificial Sequence
  Made in the lab
tttccatgaactctggagcctcagc

SEQ ID NO: 4852 - DNA, 25 bp, Artificial Sequence
  Made in the lab
aatcattgccttcacgggtcctctc

SEQ ID NO: 4853 - DNA, 25 bp, Artificial Sequence
  Made in the lab
tataccagcgctaccttagaggtgg

SEQ ID NO: 4854 - DNA, 25 bp, Artificial Sequence
  Made in the lab
atgaagctcacccagttatccttcc

SEQ ID NO: 4855 - DNA, 25 bp, Artificial Sequence
  Made in the lab
ttggaaggcacatcccagaggaagt

SEQ ID NO: 4856 - DNA, 25 bp, Artificial Sequence
  Made in the lab
cttcgatgtattcaaatgactcagg

SEQ ID NO: 4857 - DNA, 25 bp, Artificial Sequence
  Made in the lab
atagtttgccagctcgttgacaccc

SEQ ID NO: 4858 - DNA, 25 bp, Artificial Sequence
  Made in the lab
ttcttgatcagctttctcgtgaggg

SEQ ID NO: 4859 - DNA, 25 bp, Artificial Sequence
  Made in the lab
tacagatgaacttgtaaaggagttc

SEQ ID NO: 4860 - DNA, 25 bp, Artificial Sequence
  Made in the lab
atgccagattccctgcaaagtagcg

SEQ ID NO: 4861 - DNA, 25 bp, Artificial Sequence
  Made in the lab
atttgtagatcttaaccaggcagtc

SEQ ID NO: 4862 - DNA, 25 bp, Artificial Sequence
  Made in the lab
agaacattggaccatgcacccttga

SEQ ID NO: 4863 - DNA, 25 bp, Artificial Sequence
  Made in the lab
aaagtacctccagaactgcgtgtgc

SEQ ID NO: 4864 - DNA, 25 bp, Artificial Sequence
  Made in the lab
aaatccagcgggtacacgaagcaga

SEQ ID NO: 4865 - DNA, 25 bp, Artificial Sequence
  Made in the lab
tttgcgcccgaactgcatcatcatg

SEQ ID NO: 4866 - DNA, 25 bp, Artificial Sequence
  Made in the lab
acaccaagtccaatcaaagccattc

SEQ ID NO: 4867 - DNA, 25 bp, Artificial Sequence
  Made in the lab
aaatgcatttgcctctgcacttccc

SEQ ID NO: 4868 - DNA, 25 bp, Artificial Sequence
  Made in the lab
ttgcggtcacacttaatttgccacc

SEQ ID NO: 4869 - DNA, 25 bp, Artificial Sequence
  Made in the lab
gcctgatgttcaaacacctggtaca

SEQ ID NO: 4870 - DNA, 25 bp, Artificial Sequence
  Made in the lab
cctgtgaagctcattgggatgaatt

SEQ ID NO: 4871 - DNA, 25 bp, Artificial Sequence
  Made in the lab
accatgatatctggcagatgtataa

SEQ ID NO: 4872 - DNA, 25 bp, Artificial Sequence
  Made in the lab
tttgacagcatcaacaatgatctcc

SEQ ID NO: 4873 - DNA, 25 bp, Artificial Sequence
  Made in the lab
tttactaagtattggaacatcaggc

SEQ ID NO: 4874 - DNA, 25 bp, Artificial Sequence
  Made in the lab
tatctgtggtttctgccataactgc

SEQ ID NO: 4875 - DNA, 25 bp, Artificial Sequence
  Made in the lab
aataacacacacttgaggttccagg

SEQ ID NO: 4876 - DNA, 25 bp, Artificial Sequence
  Made in the lab
ataaagggcatgctttctatgtccc

SEQ ID NO: 4877 - DNA, 25 bp, Artificial Sequence
  Made in the lab
agcacctgcatacaaccagatctgg

SEQ ID NO: 4878 - DNA, 25 bp, Artificial Sequence
  Made in the lab
aaatttgtggattgaccctttgtcc

SEQ ID NO: 4879 - DNA, 25 bp, Artificial Sequence
  Made in the lab
aataccgcctgtaagcgccattgct

SEQ ID NO: 4880 - DNA, 25 bp, Artificial Sequence
  Made in the lab
tccctgttcatatttcttcactttc

SEQ ID NO: 4881 - DNA, 24 bp, Artificial Sequence
  Made in the lab
ggcaaactcactagtatgcacttc

SEQ ID NO: 4882 - DNA, 26 bp, Artificial Sequence
  Made in the lab
aaataatacatcccagtcttcaaacc

SEQ ID NO: 4883 - DNA, 19 bp, Artificial Sequence
  Made in the lab
cagcaagcgatggcatagt

SEQ ID NO: 4884 - DNA, 20 bp, Artificial Sequence
  Made in the lab
agcgggcttctgtaatctga

SEQ ID NO: 4885 - DNA, 24 bp, Artificial Sequence
  Made in the lab
tgaccttgatttattttgcatacc

SEQ ID NO: 4886 - DNA, 20 bp, Artificial Sequence
  Made in the lab
cgagcaagacgttcagtcct

SEQ ID NO: 4887 - DNA, 21 bp, Artificial Sequence
  Made in the lab
tgaggccaagaagcaacttca

SEQ ID NO: 4888 - DNA, 18 bp, Artificial Sequence
  Made in the lab
ctcatgacggcgcttggt

SEQ ID NO: 4889 - DNA, 25 bp, Artificial Sequence
  Made in the lab
ttgaagaagcggataagcagctccc

SEQ ID NO: 4890 - DNA, 25 bp, Artificial Sequence
  Made in the lab
tttacgaagtccaaggactgctggc

SEQ ID NO: 4891 - DNA, 25 bp, Artificial Sequence
  Made in the lab
tctacattgaggacggtacaggacc

SEQ ID NO: 4892 - DNA, 25 bp, Artificial Sequence
  Made in the lab
tgtcttatcactttggctggctccc

SEQ ID NO: 4893 - DNA, 25 bp, Artificial Sequence
  Made in the lab
ttcatcatcagcattgaattccgcc

SEQ ID NO: 4894 - DNA, 25 bp, Artificial Sequence
  Made in the lab
tgacacttcacccacatacatgggc

SEQ ID NO: 4895 - DNA, 25 bp, Artificial Sequence
  Made in the lab
atgtatggcatccaggacactgtgt

SEQ ID NO: 4896 - DNA, 25 bp, Artificial Sequence
  Made in the lab
aagtcttccatgaattcaccggtcc

SEQ ID NO: 4897 - DNA, 25 bp, Artificial Sequence
  Made in the lab
ttacagaccacagcaacgtcaaggg

SEQ ID NO: 4898 - DNA, 25 bp, Artificial Sequence
  Made in the lab
tattgttgttggttgacaggtttcc

SEQ ID NO: 4899 - DNA, 25 bp, Artificial Sequence
  Made in the lab
ttagcaaggatgctgaggtcgtctc

SEQ ID NO: 4900 - DNA, 25 bp, Artificial Sequence
  Made in the lab
ttgaaatataggcagaaagaatgcc

SEQ ID NO: 4901 - DNA, 25 bp, Artificial Sequence
  Made in the lab
agcgtcatcacacacgtgaacacga

SEQ ID NO: 4902 - DNA, 25 bp, Artificial Sequence
  Made in the lab
aaagaggccgctgtataatgccagc

SEQ ID NO: 4903 - DNA, 25 bp, Artificial Sequence
  Made in the lab
acgaaattcaagtaattccatcctc

SEQ ID NO: 4904 - DNA, 25 bp, Artificial Sequence
  Made in the lab
agataaatcagcccagcaactgcca

SEQ ID NO: 4905 - DNA, 25 bp, Artificial Sequence
  Made in the lab
attatgaggagttccacccagactc

SEQ ID NO: 4906 - DNA, 25 bp, Artificial Sequence
  Made in the lab
taatgagaaatttcccagtagccgc

SEQ ID NO: 4907 - DNA, 25 bp, Artificial Sequence
  Made in the lab
tttgttggattcgagtaggctcagg

SEQ ID NO: 4908 - DNA, 25 bp, Artificial Sequence
  Made in the lab
aagttgagccggcaagaaggaagtc

SEQ ID NO: 4909 - DNA, 25 bp, Artificial Sequence
  Made in the lab
aagagcatcagctggtagagtcgga

SEQ ID NO: 4910 - DNA, 25 bp, Artificial Sequence
  Made in the lab
aaggcaaggcctctggaaagcatga

SEQ ID NO: 4911 - DNA, 25 bp, Artificial Sequence
  Made in the lab
aatgacggagcatagagcacaactc

SEQ ID NO: 4912 - DNA, 25 bp, Artificial Sequence
  Made in the lab
accagtgtctggaacacatctgtcc

SEQ ID NO: 4913 - DNA, 25 bp, Artificial Sequence
  Made in the lab
aatacaaggagacggtctggcttgg

SEQ ID NO: 4914 - DNA, 25 bp, Artificial Sequence
  Made in the lab
ttatataaccaactgcaaacacagc

SEQ ID NO: 4915 - DNA, 25 bp, Artificial Sequence
  Made in the lab
atgacattcaggctgaacagcgacc

SEQ ID NO: 4916 - DNA, 25 bp, Artificial Sequence
  Made in the lab
aatactaggaatattgtcagcatgg

SEQ ID NO: 4917 - DNA, 25 bp, Artificial Sequence
  Made in the lab
aacagctgtaacttgtacgcagtcc

SEQ ID NO: 4918 - DNA, 25 bp, Artificial Sequence
  Made in the lab
aatccaagcacaaagaggttccggg

SEQ ID NO: 4919 - DNA, 25 bp, Artificial Sequence
  Made in the lab
aaactcctcaaagaggtgatacagg

SEQ ID NO: 4920 - DNA, 25 bp, Artificial Sequence
  Made in the lab
tcaggtagttgttgatcttctgctc

SEQ ID NO: 4921 - DNA, 25 bp, Artificial Sequence
  Made in the lab
atcagtgacggaatgattaacaggg

SEQ ID NO: 4922 - DNA, 25 bp, Artificial Sequence
  Made in the lab
ataggtagtggataaaggtgctagc

SEQ ID NO: 4923 - DNA, 25 bp, Artificial Sequence
  Made in the lab
aaataattaggacgacgccacatgc

SEQ ID NO: 4924 - DNA, 25 bp, Artificial Sequence
  Made in the lab
ttagacttatctttccctgccttgg

SEQ ID NO: 4925 - DNA, 25 bp, Artificial Sequence
  Made in the lab
taatcacatccagaggagtgtttcc

SEQ ID NO: 4926 - DNA, 25 bp, Artificial Sequence
  Made in the lab
agtcccacgtgttccggtatttgtg

SEQ ID NO: 4927 - DNA, 25 bp, Artificial Sequence
  Made in the lab
tgcctttgtagaatgccttgagccc

SEQ ID NO: 4928 - DNA, 25 bp, Artificial Sequence
  Made in the lab
aataaagctggcgacaaagtgagtg

SEQ ID NO: 4929 - DNA, 25 bp, Artificial Sequence
  Made in the lab
taggtcatctgtctgcacagcgagg

SEQ ID NO: 4930 - DNA, 25 bp, Artificial Sequence
  Made in the lab
tcctgacgttgaccaagtctgcggg

SEQ ID NO: 4931 - DNA, 25 bp, Artificial Sequence
  Made in the lab
ttgaagatggcactgagagagttcc

SEQ ID NO: 4932 - DNA, 25 bp, Artificial Sequence
  Made in the lab
tgataaagtagccgaaggcactttc

SEQ ID NO: 4933 - DNA, 25 bp, Artificial Sequence
  Made in the lab
tggagactgaaactccagattcctc

SEQ ID NO: 4934 - DNA, 25 bp, Artificial Sequence
  Made in the lab
tgtgaagaccaacacaaggcacagc

SEQ ID NO: 4935 - DNA, 25 bp, Artificial Sequence
  Made in the lab
taacacacgatggacatgaggatgc

SEQ ID NO: 4936 - DNA, 25 bp, Artificial Sequence
  Made in the lab
aagatccagggtcagagctactttc

SEQ ID NO: 4937 - DNA, 25 bp, Artificial Sequence
  Made in the lab
atttatgtaagcttgaacgactgtc

SEQ ID NO: 4938 - DNA, 25 bp, Artificial Sequence
  Made in the lab
aaatcttgtctatcctctcttgctc

SEQ ID NO: 4939 - DNA, 25 bp, Artificial Sequence
  Made in the lab
attaacagtaagttggaactgaagg

SEQ ID NO: 4940 - DNA, 25 bp, Artificial Sequence
  Made in the lab
ttcttgtgcatgctggccttcttcc

SEQ ID NO: 4941 - DNA, 25 bp, Artificial Sequence
  Made in the lab
atctgtgtctggatccgattcaggc

SEQ ID NO: 4942 - DNA, 25 bp, Artificial Sequence
  Made in the lab
ttccaggtcggtgtcatcaatgagg

SEQ ID NO: 4943 - DNA, 25 bp, Artificial Sequence
  Made in the lab
aaacgtctcaatcacaaagtagagg

SEQ ID NO: 4944 - DNA, 25 bp, Artificial Sequence
  Made in the lab
aaagcttgtcttccgggatctgctc

SEQ ID NO: 4945 - DNA, 25 bp, Artificial Sequence
  Made in the lab
aatgtgtccatgatcaagttcaccc

SEQ ID NO: 4946 - DNA, 25 bp, Artificial Sequence
  Made in the lab
aatatcaccaaccacaatctcagcc

SEQ ID NO: 4947 - DNA, 25 bp, Artificial Sequence
  Made in the lab
attacgcacagcctgataatcctgc

SEQ ID NO: 4948 - DNA, 25 bp, Artificial Sequence
  Made in the lab
atctgagtctggatacggttcaggc

SEQ ID NO: 4949 - DNA, 25 bp, Artificial Sequence
  Made in the lab
tataaatagaggcttctctagcagc

SEQ ID NO: 4950 - DNA, 25 bp, Artificial Sequence
  Made in the lab
tttcatggaggaaagtttatagagg

SEQ ID NO: 4951 - DNA, 25 bp, Artificial Sequence
  Made in the lab
aaatggctcccataatgccaggacc

SEQ ID NO: 4952 - DNA, 25 bp, Artificial Sequence
  Made in the lab
tacaacaggacctctgtcaatgggt

SEQ ID NO: 4953 - DNA, 25 bp, Artificial Sequence
  Made in the lab
atgatatcaaggaagtcttcggcca

SEQ ID NO: 4954 - DNA, 25 bp, Artificial Sequence
  Made in the lab
tttggatttctttaccaaaccagcc

SEQ ID NO: 4955 - DNA, 25 bp, Artificial Sequence
  Made in the lab
ttgattggatatttggccatgtccc

SEQ ID NO: 4956 - DNA, 25 bp, Artificial Sequence
  Made in the lab
tagacttctagttagcaaacttcct

SEQ ID NO: 4957 - DNA, 25 bp, Artificial Sequence
  Made in the lab
tagaccttggaactaccatttcggc

SEQ ID NO: 4958 - DNA, 25 bp, Artificial Sequence
  Made in the lab
aggaattgccttctgcactgcagcc

SEQ ID NO: 4959 - DNA, 25 bp, Artificial Sequence
  Made in the lab
tggtcaatttggacatcaacatcgt

SEQ ID NO: 4960 - DNA, 25 bp, Artificial Sequence
  Made in the lab
tggcatttgcaccaaacaaggctcc

SEQ ID NO: 4961 - DNA, 25 bp, Artificial Sequence
  Made in the lab
atgtcatcccggtttagaaattgcc

SEQ ID NO: 4962 - DNA, 25 bp, Artificial Sequence
  Made in the lab
tggagtccttggcggcgtcatatgg

SEQ ID NO: 4963 - DNA, 25 bp, Artificial Sequence
  Made in the lab
tagcgcaggtcttcggcagtgaaca

SEQ ID NO: 4964 - DNA, 25 bp, Artificial Sequence
  Made in the lab
taaccatcatatatatcatcagccc

SEQ ID NO: 4965 - DNA, 25 bp, Artificial Sequence
  Made in the lab
ttataatgcagtgtcatcatcttcc

SEQ ID NO: 4966 - DNA, 25 bp, Artificial Sequence
  Made in the lab
atagctcccaatttgaggtacttgg

SEQ ID NO: 4967 - DNA, 25 bp, Artificial Sequence
  Made in the lab
aattctggttagcagaagataaagg

SEQ ID NO: 4968 - DNA, 25 bp, Artificial Sequence
  Made in the lab
atatcccgtggaccgataatttccg

SEQ ID NO: 4969 - DNA, 25 bp, Artificial Sequence
  Made in the lab
aagggagccactttgctcttgatgg

SEQ ID NO: 4970 - DNA, 25 bp, Artificial Sequence
  Made in the lab
aatcttggaaatctccttctttctc

SEQ ID NO: 4971 - DNA, 25 bp, Artificial Sequence
  Made in the lab
caataatggtgttcaatctgtgtgc

SEQ ID NO: 4972 - DNA, 25 bp, Artificial Sequence
  Made in the lab
aaatagttaaggtcgagggctgtcc

SEQ ID NO: 4973 - DNA, 25 bp, Artificial Sequence
  Made in the lab
taagatggcaacaacgggtcctcca

SEQ ID NO: 4974 - DNA, 25 bp, Artificial Sequence
  Made in the lab
aacctcttccattagaaacaaactc

SEQ ID NO: 4975 - DNA, 25 bp, Artificial Sequence
  Made in the lab
attctgagctgagaatgcatggagg

SEQ ID NO: 4976 - DNA, 25 bp, Artificial Sequence
  Made in the lab
ttagcttccaaccacgtgtaaatcc

SEQ ID NO: 4977 - DNA, 25 bp, Artificial Sequence
  Made in the lab
aaacgatgagctatcacaatggtgg

SEQ ID NO: 4978 - DNA, 25 bp, Artificial Sequence
  Made in the lab
ttggtactaagctttctgtcttggg

SEQ ID NO: 4979 - DNA, 25 bp, Artificial Sequence
  Made in the lab
taattattcctgtcccaagatttgc

SEQ ID NO: 4980 - DNA, 25 bp, Artificial Sequence
  Made in the lab
ttcaccaaatgtgacatttccttcc

SEQ ID NO: 4981 - DNA, 25 bp, Artificial Sequence
  Made in the lab
tggatagcgtctataatggttacgg

SEQ ID NO: 4982 - DNA, 25 bp, Artificial Sequence
  Made in the lab
tttgctggtaattgcgtggaggacc

SEQ ID NO: 4983 - DNA, 25 bp, Artificial Sequence
  Made in the lab
tactgtggtcgacgcccatagggtc

SEQ ID NO: 4984 - DNA, 25 bp, Artificial Sequence
  Made in the lab
caaggtagaccagtgaggcagaata

SEQ ID NO: 4985 - DNA, 25 bp, Artificial Sequence
  Made in the lab
cagcctagagaggacggcaatgaag

SEQ ID NO: 4986 - DNA, 25 bp, Artificial Sequence
  Made in the lab
acgatctgtgtatagtgacaggtat

SEQ ID NO: 4987 - DNA, 25 bp, Artificial Sequence
  Made in the lab
caagactggcatgactggatgaata

SEQ ID NO: 4988 - DNA, 25 bp, Artificial Sequence
  Made in the lab
gcaaggcattcctcttgaatattta

SEQ ID NO: 4989 - DNA, 25 bp, Artificial Sequence
  Made in the lab
gcgtggctgtcataggcatcgacga

SEQ ID NO: 4990 - DNA, 25 bp, Artificial Sequence
  Made in the lab
gacatcatggagttctgcgaggcca

SEQ ID NO: 4991 - DNA, 25 bp, Artificial Sequence
  Made in the lab
gcactggatgggaccttccagagga

SEQ ID NO: 4992 - DNA, 25 bp, Artificial Sequence
  Made in the lab
gggatcgaatattaactccagagaa

SEQ ID NO: 4993 - DNA, 25 bp, Artificial Sequence
  Made in the lab
ggaagacgacatgcctggaattctt

SEQ ID NO: 4994 - DNA, 25 bp, Artificial Sequence
  Made in the lab
cctgagacttgttaccagaggttaa

SEQ ID NO: 4995 - DNA, 25 bp, Artificial Sequence
  Made in the lab
cctcatgagagaggtaaacaccttt

SEQ ID NO: 4996 - DNA, 25 bp, Artificial Sequence
  Made in the lab
cctgcactgcccaaagtcttggaaa

SEQ ID NO: 4997 - DNA, 25 bp, Artificial Sequence
  Made in the lab
gccaggaagccagtacagatctttg

SEQ ID NO: 4998 - DNA, 25 bp, Artificial Sequence
  Made in the lab
gagttgtgaaaggcctgcaagaagt

SEQ ID NO: 4999 - DNA, 25 bp, Artificial Sequence
  Made in the lab
tggaaactgttgaggttcttcagaa

SEQ ID NO: 5000 - DNA, 25 bp, Artificial Sequence
  Made in the lab
gctgttgcagctagcagatgcttta

SEQ ID NO: 5001 - DNA, 25 bp, Artificial Sequence
  Made in the lab
gctagcattatgtgcagttacaata

SEQ ID NO: 5002 - DNA, 25 bp, Artificial Sequence
  Made in the lab
gccactgaagagggacccattaata

SEQ ID NO: 5003 - DNA, 25 bp, Artificial Sequence
  Made in the lab
ggctacaaagctgctttcattggaa

SEQ ID NO: 5004 - DNA, 19 bp, Artificial Sequence
  Made in the lab
ctacccgctcaggcttttc

SEQ ID NO: 5005 - DNA, 21 bp, Artificial Sequence
  Made in the lab
caccaaactgggaagtacgag

SEQ ID NO: 5006 - DNA, 23 bp, Artificial Sequence
  Made in the lab
tggagatcatcatgaaagagacc

SEQ ID NO: 5007 - DNA, 20 bp, Artificial Sequence
  Made in the lab
gcgaatgacaccgtactcct

SEQ ID NO: 5008 - DNA, 19 bp, Artificial Sequence
  Made in the lab
cagaacagcctggacgaga

SEQ ID NO: 5009 - DNA, 18 bp, Artificial Sequence
  Made in the lab
agccagatgccttgaagc

SEQ ID NO: 5010 - DNA, 24 bp, Artificial Sequence
  Made in the lab
gcagatttggcagagagtataatg

SEQ ID NO: 5011 - DNA, 26 bp, Artificial Sequence
  Made in the lab
gacatcatcctttattccgtaaagac

SEQ ID NO: 5012 - DNA, 18 bp, Artificial Sequence
  Made in the lab
acatcttccgcagcgagt

SEQ ID NO: 5013 - DNA, 26 bp, Artificial Sequence
  Made in the lab
ggctgtagtctctgagatcttacctt

SEQ ID NO: 5014 - DNA, 20 bp, Artificial Sequence
  Made in the lab
tcagcaaccaggagacctgt

SEQ ID NO: 5015 - DNA, 24 bp, Artificial Sequence
  Made in the lab
cacaaccactctgaacaatgtaga

SEQ ID NO: 5016 - DNA, 20 bp, Artificial Sequence
  Made in the lab
cccagaaaggcatcctgata

SEQ ID NO: 5017 - DNA, 20 bp, Artificial Sequence
  Made in the lab
cagccacaccaaggaatctt

SEQ ID NO: 5018 - DNA, 20 bp, Artificial Sequence
  Made in the lab
aagttcctgcgagtcagcac

SEQ ID NO: 5019 - DNA, 18 bp, Artificial Sequence
  Made in the lab
cccaatgcccatgacttc

SEQ ID NO: 5020 - DNA, 20 bp, Artificial Sequence
  Made in the lab
cccagtttatggcttccagt

SEQ ID NO: 5021 - DNA, 20 bp, Artificial Sequence
  Made in the lab
ggtcaactccctgtcctgaa

SEQ ID NO: 5022 - DNA, 22 bp, Artificial Sequence
  Made in the lab
tgcctttgagaaatgaatgaag

SEQ ID NO: 5023 - DNA, 19 bp, Artificial Sequence
  Made in the lab
gcccaagctggtctcaagt

SEQ ID NO: 5024 - DNA, 18 bp, Artificial Sequence
  Made in the lab
agaaggggcagctggttc

SEQ ID NO: 5025 - DNA, 20 bp, Artificial Sequence
  Made in the lab
caatcaggaagcctttggaa

SEQ ID NO: 5026 - DNA, 20 bp, Artificial Sequence
  Made in the lab
ttttctctggatgacgtgga

SEQ ID NO: 5027 - DNA, 19 bp, Artificial Sequence
  Made in the lab
aatctccgccctgtagctc

SEQ ID NO: 5028 - DNA, 22 bp, Artificial Sequence
  Made in the lab
ggctgtatacaaactcgctgaa

SEQ ID NO: 5029 - DNA, 22 bp, Artificial Sequence
  Made in the lab
gaggtctcaatggtctgtaggg

SEQ ID NO: 5030 - DNA, 20 bp, Artificial Sequence
  Made in the lab
caaagtgtaaaccgcatgga

SEQ ID NO: 5031 - DNA, 23 bp, Artificial Sequence
  Made in the lab
tccaggtaactgttcacactcaa

SEQ ID NO: 5032 - DNA, 20 bp, Artificial Sequence
  Made in the lab
aggattccagcagattttgg

SEQ ID NO: 5033 - DNA, 21 bp, Artificial Sequence
  Made in the lab
caatgggtcccaccatataga

SEQ ID NO: 5034 - DNA, 20 bp, Artificial Sequence
  Made in the lab
gaagggagtgaccatcatcg

SEQ ID NO: 5035 - DNA, 20 bp, Artificial Sequence
  Made in the lab
ttaaagcacccaggcttgat

SEQ ID NO: 5036 - DNA, 20 bp, Artificial Sequence
  Made in the lab
gccgcctacttcggtatcta

SEQ ID NO: 5037 - DNA, 20 bp, Artificial Sequence
  Made in the lab
ggcaacagcagtgacagtct

SEQ ID NO: 5038 - DNA, 18 bp, Artificial Sequence
  Made in the lab
gcgcatgatgatgcagtt

SEQ ID NO: 5039 - DNA, 18 bp, Artificial Sequence
  Made in the lab
ccacgcacccttgaagaa

SEQ ID NO: 5040 - DNA, 25 bp, Artificial Sequence
  Made in the lab
cctgactataggattggaaaagtga

SEQ ID NO: 5041 - DNA, 21 bp, Artificial Sequence
  Made in the lab
tgcacttgtgaaatggttctg

SEQ ID NO: 5042 - DNA, 19 bp, Artificial Sequence
  Made in the lab
gcagccagtgatggaattg

SEQ ID NO: 5043 - DNA, 19 bp, Artificial Sequence
  Made in the lab
ggaacctgcacctcctgac

SEQ ID NO: 5044 - DNA, 20 bp, Artificial Sequence
  Made in the lab
ccacaagggcaatagagcag

SEQ ID NO: 5045 - DNA, 21 bp, Artificial Sequence
  Made in the lab
tggaaagagatggctgacaga

SEQ ID NO: 5046 - DNA, 20 bp, Artificial Sequence
  Made in the lab
gaagtggctccatctgcatt

SEQ ID NO: 5047 - DNA, 21 bp, Artificial Sequence
  Made in the lab
caccttgtacactgctgttgc

SEQ ID NO: 5048 - DNA, 21 bp, Artificial Sequence
  Made in the lab
ggttgtgccatactcatgacc

SEQ ID NO: 5049 - DNA, 22 bp, Artificial Sequence
  Made in the lab
cagataggacatccagggtagc

SEQ ID NO: 5050 - DNA, 22 bp, Artificial Sequence
  Made in the lab
tcatccttccagtatgggtaca

SEQ ID NO: 5051 - DNA, 23 bp, Artificial Sequence
  Made in the lab
ttgtaaaattgttgcatgagcag

SEQ ID NO: 5052 - DNA, 21 bp, Artificial Sequence
  Made in the lab
tgctgctttttcaattggtct

SEQ ID NO: 5053 - DNA, 20 bp, Artificial Sequence
  Made in the lab
aggaaagatctcgctgagca

SEQ ID NO: 5054 - DNA, 19 bp, Artificial Sequence
  Made in the lab
caagtccggatgctcactc

SEQ ID NO: 5055 - DNA, 18 bp, Artificial Sequence
  Made in the lab
ggttttccctggctgaca

SEQ ID NO: 5056 - DNA, 20 bp, Artificial Sequence
  Made in the lab
caaagctgagctcctccagt

SEQ ID NO: 5057 - DNA, 21 bp, Artificial Sequence
  Made in the lab
caagatccagggtcagagcta

SEQ ID NO: 5058 - DNA, 20 bp, Artificial Sequence
  Made in the lab
gaggaatatcaccggaacca

SEQ ID NO: 5059 - DNA, 19 bp, Artificial Sequence
  Made in the lab
aggatgttcatcccctcca

SEQ ID NO: 5060 - DNA, 21 bp, Artificial Sequence
  Made in the lab
ccagaatgccgagatgataga

SEQ ID NO: 5061 - DNA, 20 bp, Artificial Sequence
  Made in the lab
cacttgaggccaagagttga

SEQ ID NO: 5062 - DNA, 20 bp, Artificial Sequence
  Made in the lab
ttatacagcggcctctttgc

SEQ ID NO: 5063 - DNA, 21 bp, Artificial Sequence
  Made in the lab
tgatcatttcctctgtgacga

SEQ ID NO: 5064 - DNA, 20 bp, Artificial Sequence
  Made in the lab
aatgcccagatatgcatcgt

SEQ ID NO: 5065 - DNA, 20 bp, Artificial Sequence
  Made in the lab
aggaaaacaaagctgggatg

SEQ ID NO: 5066 - DNA, 20 bp, Artificial Sequence
  Made in the lab
tatcccatgagcattcagca

SEQ ID NO: 5067 - DNA, 22 bp, Artificial Sequence
  Made in the lab
cacaaagtacaggacgaactgg

SEQ ID NO: 5068 - DNA, 25 bp, Artificial Sequence
  Made in the lab
acattgagtcaaaaatccctctaaa

SEQ ID NO: 5069 - DNA, 19 bp, Artificial Sequence
  Made in the lab
aaggagacggtctggcttg

SEQ ID NO: 5070 - DNA, 22 bp, Artificial Sequence
  Made in the lab
ttcctccctggtacctgtgtat

SEQ ID NO: 5071 - DNA, 20 bp, Artificial Sequence
  Made in the lab
cgctgaagcatgtcaggtag

SEQ ID NO: 5072 - DNA, 19 bp, Artificial Sequence
  Made in the lab
ggggttagggagattgtgc

SEQ ID NO: 5073 - DNA, 20 bp, Artificial Sequence
  Made in the lab
ttcaggacagtggctgtgag

SEQ ID NO: 5074 - DNA, 18 bp, Artificial Sequence
  Made in the lab
ggatgcagaacgacgtga

SEQ ID NO: 5075 - DNA, 18 bp, Artificial Sequence
  Made in the lab
tacgcggtacaggccatc

SEQ ID NO: 5076 - DNA, 19 bp, Artificial Sequence
  Made in the lab
tccacctgtcaggcatcat

SEQ ID NO: 5077 - DNA, 20 bp, Artificial Sequence
  Made in the lab
gatgttggcctccacatagg

SEQ ID NO: 5078 - DNA, 20 bp, Artificial Sequence
  Made in the lab
cattgtggaatgctgtcctg

SEQ ID NO: 5079 - DNA, 20 bp, Artificial Sequence
  Made in the lab
catgtcattgagccgaccta

SEQ ID NO: 5080 - DNA, 24 bp, Artificial Sequence
  Made in the lab
attgttttaggcacttttgtggta

SEQ ID NO: 5081 - DNA, 24 bp, Artificial Sequence
  Made in the lab
tgaaagttctgaacaactgaaagg

SEQ ID NO: 5082 - DNA, 20 bp, Artificial Sequence
  Made in the lab
agcccaggtcaaatatggtg

SEQ ID NO: 5083 - DNA, 21 bp, Artificial Sequence
  Made in the lab
tctccagttagggagctttca

SEQ ID NO: 5084 - DNA, 20 bp, Artificial Sequence
  Made in the lab
ttctctctgctgccaatcct

SEQ ID NO: 5085 - DNA, 20 bp, Artificial Sequence
  Made in the lab
ctacggaacgctttcaccac

SEQ ID NO: 5086 - DNA, 21 bp, Artificial Sequence
  Made in the lab
tgaagaaacctggatctttgc

SEQ ID NO: 5087 - DNA, 22 bp, Artificial Sequence
  Made in the lab
ccagcaactgtagtggtagacg

SEQ ID NO: 5088 - DNA, 21 bp, Artificial Sequence
  Made in the lab
gccactcttggtatcgttcag

SEQ ID NO: 5089 - DNA, 20 bp, Artificial Sequence
  Made in the lab
gaggggaaatgcttacgttg

SEQ ID NO: 5090 - DNA, 20 bp, Artificial Sequence
  Made in the lab
ctggcagtcagtcggaacta

SEQ ID NO: 5091 - DNA, 27 bp, Artificial Sequence
  Made in the lab
cattgactccagatactgtcttgtatg

SEQ ID NO: 5092 - DNA, 24 bp, Artificial Sequence
  Made in the lab
aatcttcagaatttggaacgaaag

SEQ ID NO: 5093 - DNA, 24 bp, Artificial Sequence
  Made in the lab
caagaacaaagtcatccttcttca

SEQ ID NO: 5094 - DNA, 18 bp, Artificial Sequence
  Made in the lab
aagccggctggatctcat

SEQ ID NO: 5095 - DNA, 19 bp, Artificial Sequence
  Made in the lab
gcatttgcaccaaacaagg

SEQ ID NO: 5096 - DNA, 18 bp, Artificial Sequence
  Made in the lab
gaaccgccatcccaattt

SEQ ID NO: 5097 - DNA, 21 bp, Artificial Sequence
  Made in the lab
caatgtcatcccggtttagaa

SEQ ID NO: 5098 - DNA, 20 bp, Artificial Sequence
  Made in the lab
atctccctgtctgtggttgg

SEQ ID NO: 5099 - DNA, 19 bp, Artificial Sequence
  Made in the lab
aatgatggaggagccggta

SEQ ID NO: 5100 - DNA, 21 bp, Artificial Sequence
  Made in the lab
ccatgctctttgtgttcattg

SEQ ID NO: 5101 - DNA, 20 bp, Artificial Sequence
  Made in the lab
agggcttctgaggttttgct

SEQ ID NO: 5102 - DNA, 20 bp, Artificial Sequence
  Made in the lab
agagggtgtcagaggcaatc

SEQ ID NO: 5103 - DNA, 23 bp, Artificial Sequence
  Made in the lab
catcaagtagcaaaaaggtctgg

SEQ ID NO: 5104 - DNA, 20 bp, Artificial Sequence
  Made in the lab
gcctacaataaagggcagga

SEQ ID NO: 5105 - DNA, 20 bp, Artificial Sequence
  Made in the lab
gcatcgcacacgtaaacaaa

SEQ ID NO: 5106 - DNA, 20 bp, Artificial Sequence
  Made in the lab
acagaaagcgaagcagtggt

SEQ ID NO: 5107 - DNA, 19 bp, Artificial Sequence
  Made in the lab
ggtggtccgaccttttctg

SEQ ID NO: 5108 - DNA, 22 bp, Artificial Sequence
  Made in the lab
ggagtttgatgttgttgaagga

SEQ ID NO: 5109 - DNA, 20 bp, Artificial Sequence
  Made in the lab
aactggaacaccaccaggac

SEQ ID NO: 5110 - DNA, 25 bp, Artificial Sequence
  Made in the lab
gccaagtctgtgacttgcacgtact

SEQ ID NO: 5111 - DNA, 25 bp, Artificial Sequence
  Made in the lab
ccgcaacaacgccatctatgagaaa

SEQ ID NO: 5112 - RNA, 25 nt, Artificial Sequence
  Made in the lab
aucaguggauguguugccaguuccc

SEQ ID NO: 5113 - RNA, 25 nt, Artificial Sequence
  Made in the lab
ugcaccugaucauagagugugcugc

SEQ ID NO: 5114 - RNA, 25 nt, Artificial Sequence
  Made in the lab
ucucauggaagacugcugaccuucc

SEQ ID NO: 5115 - RNA, 25 nt, Artificial Sequence
  Made in the lab
uuugccagacaucaggaugaaaggc

SEQ ID NO: 5116 - RNA, 25 nt, Artificial Sequence
  Made in the lab
ucuugaacaagauccgagcguagcc

SEQ ID NO: 5117 - RNA, 25 nt, Artificial Sequence
  Made in the lab
uuauggagacaugucccuggagcuc

SEQ ID NO: 5118 - RNA, 25 nt, Artificial Sequence
  Made in the lab
auacuggucaaccuucugcacuugg

SEQ ID NO: 5119 - RNA, 25 nt, Artificial Sequence
  Made in the lab
aaugagaccaaucucacaguugugg

SEQ ID NO: 5120 - RNA, 25 nt, Artificial Sequence
  Made in the lab
uuaacaaugaugcugucgucacagg

SEQ ID NO: 5121 - RNA, 25 nt, Artificial Sequence
  Made in the lab
auuaagacggcuuucucccucuugc

SEQ ID NO: 5122 - RNA, 25 nt, Artificial Sequence
  Made in the lab
aaauauguucacguuacgcuggacc

SEQ ID NO: 5123 - RNA, 25 nt, Artificial Sequence
  Made in the lab
uauacucucugccaaaucugcuaca

SEQ ID NO: 5124 - RNA, 25 nt, Artificial Sequence
  Made in the lab
aaugucugucuucaucuucuccguc

SEQ ID NO: 5125 - RNA, 25 nt, Artificial Sequence
  Made in the lab
uaguagucauggcacuucucguucc

SEQ ID NO: 5126 - RNA, 25 nt, Artificial Sequence
  Made in the lab
uagucucugagaucuuaccuuccgc

SEQ ID NO: 5127 - RNA, 25 nt, Artificial Sequence
  Made in the lab
aauugucauugauuucgccacaacc

SEQ ID NO: 5128 - RNA, 25 nt, Artificial Sequence
  Made in the lab
uccacauucagccugucugcaaugg

SEQ ID NO: 5129 - RNA, 25 nt, Artificial Sequence
  Made in the lab
ucaagauggcauaaacucugguggc

SEQ ID NO: 5130 - RNA, 25 nt, Artificial Sequence
  Made in the lab
auaugaugcagccaccacaugccuc

SEQ ID NO: 5131 - RNA, 25 nt, Artificial Sequence
  Made in the lab
aauaccuucaccaaagcaagccacc

SEQ ID NO: 5132 - RNA, 25 nt, Artificial Sequence
  Made in the lab
uucccaagcaugguacccuuauccc

SEQ ID NO: 5133 - RNA, 25 nt, Artificial Sequence
  Made in the lab
uucaagagaauuugcugccucgcuc

SEQ ID NO: 5134 - RNA, 25 nt, Artificial Sequence
  Made in the lab
ugucugagaagccaagacacuuggc

SEQ ID NO: 5135 - RNA, 25 nt, Artificial Sequence
  Made in the lab
aacugugucaaucuguuucacugcu

SEQ ID NO: 5136 - RNA, 25 nt, Artificial Sequence
  Made in the lab
aagaucugcuuauucaguaacuggg

SEQ ID NO: 5137 - RNA, 25 nt, Artificial Sequence
  Made in the lab
uagaagugcauacuagugaguuugc

SEQ ID NO: 5138 - RNA, 25 nt, Artificial Sequence
  Made in the lab
auucaaagaugucuaaaugccaagg

SEQ ID NO: 5139 - RNA, 25 nt, Artificial Sequence
  Made in the lab
agcagagggaauucaucucucaggc

SEQ ID NO: 5140 - RNA, 25 nt, Artificial Sequence
  Made in the lab
uguggaucccuugauaaaccacagc

SEQ ID NO: 5141 - RNA, 25 nt, Artificial Sequence
  Made in the lab
auucagguaaauaugugcaucuccc

SEQ ID NO: 5142 - RNA, 25 nt, Artificial Sequence
  Made in the lab
aauaucugaauucauuccugagcgg

SEQ ID NO: 5143 - RNA, 25 nt, Artificial Sequence
  Made in the lab
uuucaaagucuugcaugauccuugu

SEQ ID NO: 5144 - RNA, 25 nt, Artificial Sequence
  Made in the lab
uucuggcagaaguuuauauuucucc

SEQ ID NO: 5145 - RNA, 25 nt, Artificial Sequence
  Made in the lab
uucugcacgaucuucucacacuggg

SEQ ID NO: 5146 - RNA, 25 nt, Artificial Sequence
  Made in the lab
uagccaucaaucaggaagccuuugg

SEQ ID NO: 5147 - RNA, 25 nt, Artificial Sequence
  Made in the lab
aaacucuucuccuugcugcaccucc

SEQ ID NO: 5148 - RNA, 25 nt, Artificial Sequence
  Made in the lab
uagcugaucugguucacgauggugc

SEQ ID NO: 5149 - RNA, 25 nt, Artificial Sequence
  Made in the lab
augagcugcaaacagagggcucuuc

SEQ ID NO: 5150 - RNA, 25 nt, Artificial Sequence
  Made in the lab
uuucuaugcaccgaaacugccaagg

SEQ ID NO: 5151 - RNA, 25 nt, Artificial Sequence
  Made in the lab
uuugaguggaacugaacagcugggu

SEQ ID NO: 5152 - RNA, 25 nt, Artificial Sequence
  Made in the lab
ugauguguauccucggucauacagg

SEQ ID NO: 5153 - RNA, 25 nt, Artificial Sequence
  Made in the lab
ugcaaugguggcuaccucaucaggu

SEQ ID NO: 5154 - RNA, 25 nt, Artificial Sequence
  Made in the lab
auagcagcgaacugacuggauagcc

SEQ ID NO: 5155 - RNA, 25 nt, Artificial Sequence
  Made in the lab
caauucccaggcaucuauaucuggc

SEQ ID NO: 5156 - RNA, 25 nt, Artificial Sequence
  Made in the lab
auuuaaaguuggucuaaguuccugg

SEQ ID NO: 5157 - RNA, 25 nt, Artificial Sequence
  Made in the lab
uuuccaugaacucuggagccucagc

SEQ ID NO: 5158 - RNA, 25 nt, Artificial Sequence
  Made in the lab
aaucauugccuucacggguccucuc

SEQ ID NO: 5159 - RNA, 25 nt, Artificial Sequence
  Made in the lab
uauaccagcgcuaccuuagaggugg

SEQ ID NO: 5160 - RNA, 25 nt, Artificial Sequence
  Made in the lab
augaagcucacccaguuauccuucc

SEQ ID NO: 5161 - RNA, 25 nt, Artificial Sequence
  Made in the lab
uuggaaggcacaucccagaggaagu

SEQ ID NO: 5162 - RNA, 25 nt, Artificial Sequence
  Made in the lab
cuucgauguauucaaaugacucagg

SEQ ID NO: 5163 - RNA, 25 nt, Artificial Sequence
  Made in the lab
auaguuugccagcucguugacaccc

SEQ ID NO: 5164 - RNA, 25 nt, Artificial Sequence
  Made in the lab
uucuugaucagcuuucucgugaggg

SEQ ID NO: 5165 - RNA, 25 nt, Artificial Sequence
  Made in the lab
uacagaugaacuuguaaaggaguuc

SEQ ID NO: 5166 - RNA, 25 nt, Artificial Sequence
  Made in the lab
augccagauucccugcaaaguagcg

SEQ ID NO: 5167 - RNA, 25 nt, Artificial Sequence
  Made in the lab
auuuguagaucuuaaccaggcaguc

SEQ ID NO: 5168 - RNA, 25 nt, Artificial Sequence
  Made in the lab
agaacauuggaccaugcacccuuga

SEQ ID NO: 5169 - RNA, 25 nt, Artificial Sequence
  Made in the lab
aaaguaccuccagaacugcgugugc

SEQ ID NO: 5170 - RNA, 25 nt, Artificial Sequence
  Made in the lab
aaauccagcggguacacgaagcaga

SEQ ID NO: 5171 - RNA, 25 nt, Artificial Sequence
  Made in the lab
uuugcgcccgaacugcaucaucaug

SEQ ID NO: 5172 - RNA, 25 nt, Artificial Sequence
  Made in the lab
acaccaaguccaaucaaagccauuc

SEQ ID NO: 5173 - RNA, 25 nt, Artificial Sequence
  Made in the lab
aaaugcauuugccucugcacuuccc

SEQ ID NO: 5174 - RNA, 25 nt, Artificial Sequence
  Made in the lab
uugcggucacacuuaauuugccacc

SEQ ID NO: 5175 - RNA, 25 nt, Artificial Sequence
  Made in the lab
uuugacagcaucaacaaugaucucc

SEQ ID NO: 5176 - RNA, 25 nt, Artificial Sequence
  Made in the lab
uuuacuaaguauuggaacaucaggc

SEQ ID NO: 5177 - RNA, 25 nt, Artificial Sequence
  Made in the lab
uaucugugguuucugccauaacugc

SEQ ID NO: 5178 - RNA, 25 nt, Artificial Sequence
  Made in the lab
aauaacacacacuugagguuccagg

SEQ ID NO: 5179 - RNA, 25 nt, Artificial Sequence
  Made in the lab
auaaagggcaugcuuucuauguccc

SEQ ID NO: 5180 - RNA, 25 nt, Artificial Sequence
  Made in the lab
agcaccugcauacaaccagaucugg

SEQ ID NO: 5181 - RNA, 25 nt, Artificial Sequence
  Made in the lab
aaauuuguggauugacccuuugucc

SEQ ID NO: 5182 - RNA, 25 nt, Artificial Sequence
  Made in the lab
aauaccgccuguaagcgccauugcu

SEQ ID NO: 5183 - RNA, 25 nt, Artificial Sequence
  Made in the lab
ucccuguucauauuucuucacuuuc

SEQ ID NO: 5184 - RNA, 25 nt, Artificial Sequence
  Made in the lab
uugaagaagcggauaagcagcuccc

SEQ ID NO: 5185 - RNA, 25 nt, Artificial Sequence
  Made in the lab
uuuacgaaguccaaggacugcuggc

SEQ ID NO: 5186 - RNA, 25 nt, Artificial Sequence
  Made in the lab
ucuacauugaggacgguacaggacc

SEQ ID NO: 5187 - RNA, 25 nt, Artificial Sequence
  Made in the lab
ugucuuaucacuuuggcuggcuccc

SEQ ID NO: 5188 - RNA, 25 nt, Artificial Sequence
  Made in the lab
uucaucaucagcauugaauuccgcc

SEQ ID NO: 5189 - RNA, 25 nt, Artificial Sequence
  Made in the lab
ugacacuucacccacauacaugggc

SEQ ID NO: 5190 - RNA, 25 nt, Artificial Sequence
  Made in the lab
auguauggcauccaggacacugugu

SEQ ID NO: 5191 - RNA, 25 nt, Artificial Sequence
  Made in the lab
aagucuuccaugaauucaccggucc

SEQ ID NO: 5192 - RNA, 25 nt, Artificial Sequence
  Made in the lab
uuacagaccacagcaacgucaaggg

SEQ ID NO: 5193 - RNA, 25 nt, Artificial Sequence
  Made in the lab
uauuguuguugguugacagguuucc

SEQ ID NO: 5194 - RNA, 25 nt, Artificial Sequence
  Made in the lab
uuagcaaggaugcugaggucgucuc

SEQ ID NO: 5195 - RNA, 25 nt, Artificial Sequence
  Made in the lab
uugaaauauaggcagaaagaaugcc

SEQ ID NO: 5196 - RNA, 25 nt, Artificial Sequence
  Made in the lab
agcgucaucacacacgugaacacga

SEQ ID NO: 5197 - RNA, 25 nt, Artificial Sequence
  Made in the lab
aaagaggccgcuguauaaugccagc

SEQ ID NO: 5198 - RNA, 25 nt, Artificial Sequence
  Made in the lab
acgaaauucaaguaauuccauccuc

SEQ ID NO: 5199 - RNA, 25 nt, Artificial Sequence
  Made in the lab
agauaaaucagcccagcaacugcca

SEQ ID NO: 5200 - RNA, 25 nt, Artificial Sequence
  Made in the lab
auuaugaggaguuccacccagacuc

SEQ ID NO: 5201 - RNA, 25 nt, Artificial Sequence
  Made in the lab
uaaugagaaauuucccaguagccgc

SEQ ID NO: 5202 - RNA, 25 nt, Artificial Sequence
  Made in the lab
uuuguuggauucgaguaggcucagg

SEQ ID NO: 5203 - RNA, 25 nt, Artificial Sequence
  Made in the lab
aaguugagccggcaagaaggaaguc

SEQ ID NO: 5204 - RNA, 25 nt, Artificial Sequence
  Made in the lab
aagagcaucagcugguagagucgga

SEQ ID NO: 5205 - RNA, 25 nt, Artificial Sequence
  Made in the lab
aaggcaaggccucuggaaagcauga

SEQ ID NO: 5206 - RNA, 25 nt, Artificial Sequence
  Made in the lab
aaugacggagcauagagcacaacuc

SEQ ID NO: 5207 - RNA, 25 nt, Artificial Sequence
  Made in the lab
accagugucuggaacacaucugucc

SEQ ID NO: 5208 - RNA, 25 nt, Artificial Sequence
  Made in the lab
aauacaaggagacggucuggcuugg

SEQ ID NO: 5209 - RNA, 25 nt, Artificial Sequence
  Made in the lab
uuauauaaccaacugcaaacacagc

SEQ ID NO: 5210 - RNA, 25 nt, Artificial Sequence
  Made in the lab
augacauucaggcugaacagcgacc

SEQ ID NO: 5211 - RNA, 25 nt, Artificial Sequence
  Made in the lab
aauacuaggaauauugucagcaugg

SEQ ID NO: 5212 - RNA, 25 nt, Artificial Sequence
  Made in the lab
aacagcuguaacuuguacgcagucc

SEQ ID NO: 5213 - RNA, 25 nt, Artificial Sequence
  Made in the lab
aauccaagcacaaagagguuccggg

SEQ ID NO: 5214 - RNA, 25 nt, Artificial Sequence
  Made in the lab
aaacuccucaaagaggugauacagg

SEQ ID NO: 5215 - RNA, 25 nt, Artificial Sequence
  Made in the lab
ucagguaguuguugaucuucugcuc

SEQ ID NO: 5216 - RNA, 25 nt, Artificial Sequence
  Made in the lab
aucagugacggaaugauuaacaggg

SEQ ID NO: 5217 - RNA, 25 nt, Artificial Sequence
  Made in the lab
auagguaguggauaaaggugcuagc

SEQ ID NO: 5218 - RNA, 25 nt, Artificial Sequence
  Made in the lab
aaauaauuaggacgacgccacaugc

SEQ ID NO: 5219 - RNA, 25 nt, Artificial Sequence
  Made in the lab
uuagacuuaucuuucccugccuugg

SEQ ID NO: 5220 - RNA, 25 nt, Artificial Sequence
  Made in the lab
uaaucacauccagaggaguguuucc

SEQ ID NO: 5221 - RNA, 25 nt, Artificial Sequence
  Made in the lab
agucccacguguuccgguauuugug

SEQ ID NO: 5222 - RNA, 25 nt, Artificial Sequence
  Made in the lab
ugccuuuguagaaugccuugagccc

SEQ ID NO: 5223 - RNA, 25 nt, Artificial Sequence
  Made in the lab
aauaaagcuggcgacaaagugagug

SEQ ID NO: 5224 - RNA, 25 nt, Artificial Sequence
  Made in the lab
uaggucaucugucugcacagcgagg

SEQ ID NO: 5225 - RNA, 25 nt, Artificial Sequence
  Made in the lab
uccugacguugaccaagucugcggg

SEQ ID NO: 5226 - RNA, 25 nt, Artificial Sequence
  Made in the lab
uugaagauggcacugagagaguucc

SEQ ID NO: 5227 - RNA, 25 nt, Artificial Sequence
  Made in the lab
ugauaaaguagccgaaggcacuuuc

SEQ ID NO: 5228 - RNA, 25 nt, Artificial Sequence
  Made in the lab
uggagacugaaacuccagauuccuc

SEQ ID NO: 5229 - RNA, 25 nt, Artificial Sequence
  Made in the lab
ugugaagaccaacacaaggcacagc

SEQ ID NO: 5230 - RNA, 25 nt, Artificial Sequence
  Made in the lab
uaacacacgauggacaugaggaugc

SEQ ID NO: 5231 - RNA, 25 nt, Artificial Sequence
  Made in the lab
aagauccagggucagagcuacuuuc

SEQ ID NO: 5232 - RNA, 25 nt, Artificial Sequence
  Made in the lab
auuuauguaagcuugaacgacuguc

SEQ ID NO: 5233 - RNA, 25 nt, Artificial Sequence
  Made in the lab
aaaucuugucuauccucucuugcuc

SEQ ID NO: 5234 - RNA, 25 nt, Artificial Sequence
  Made in the lab
auuaacaguaaguuggaacugaagg

SEQ ID NO: 5235 - RNA, 25 nt, Artificial Sequence
  Made in the lab
uucuugugcaugcuggccuucuucc

SEQ ID NO: 5236 - RNA, 25 nt, Artificial Sequence
  Made in the lab
aucugugucuggauccgauucaggc

SEQ ID NO: 5237 - RNA, 25 nt, Artificial Sequence
  Made in the lab
uuccaggucggugucaucaaugagg

SEQ ID NO: 5238 - RNA, 25 nt, Artificial Sequence
  Made in the lab
aaacgucucaaucacaaaguagagg

SEQ ID NO: 5239 - RNA, 25 nt, Artificial Sequence
  Made in the lab
aaagcuugucuuccgggaucugcuc

SEQ ID NO: 5240 - RNA, 25 nt, Artificial Sequence
  Made in the lab
aauguguccaugaucaaguucaccc

SEQ ID NO: 5241 - RNA, 25 nt, Artificial Sequence
  Made in the lab
aauaucaccaaccacaaucucagcc

SEQ ID NO: 5242 - RNA, 25 nt, Artificial Sequence
  Made in the lab
auuacgcacagccugauaauccugc

SEQ ID NO: 5243 - RNA, 25 nt, Artificial Sequence
  Made in the lab
aucugagucuggauacgguucaggc

SEQ ID NO: 5244 - RNA, 25 nt, Artificial Sequence
  Made in the lab
uauaaauagaggcuucucuagcagc

SEQ ID NO: 5245 - RNA, 25 nt, Artificial Sequence
  Made in the lab
uuucauggaggaaaguuuauagagg

SEQ ID NO: 5246 - RNA, 25 nt, Artificial Sequence
  Made in the lab
aaauggcucccauaaugccaggacc

SEQ ID NO: 5247 - RNA, 25 nt, Artificial Sequence
  Made in the lab
uacaacaggaccucugucaaugggu

SEQ ID NO: 5248 - RNA, 25 nt, Artificial Sequence
  Made in the lab
augauaucaaggaagucuucggcca

SEQ ID NO: 5249 - RNA, 25 nt, Artificial Sequence
  Made in the lab
uuuggauuucuuuaccaaaccagcc

SEQ ID NO: 5250 - RNA, 25 nt, Artificial Sequence
  Made in the lab
uugauuggauauuuggccauguccc

SEQ ID NO: 5251 - RNA, 25 nt, Artificial Sequence
  Made in the lab
uagacuucuaguuagcaaacuuccu

SEQ ID NO: 5252 - RNA, 25 nt, Artificial Sequence
  Made in the lab
uagaccuuggaacuaccauuucggc

SEQ ID NO: 5253 - RNA, 25 nt, Artificial Sequence
  Made in the lab
aggaauugccuucugcacugcagcc

SEQ ID NO: 5254 - RNA, 25 nt, Artificial Sequence
  Made in the lab
uggucaauuuggacaucaacaucgu

SEQ ID NO: 5255 - RNA, 25 nt, Artificial Sequence
  Made in the lab
uggcauuugcaccaaacaaggcucc

SEQ ID NO: 5256 - RNA, 25 nt, Artificial Sequence
  Made in the lab
augucaucccgguuuagaaauugcc

SEQ ID NO: 5257 - RNA, 25 nt, Artificial Sequence
  Made in the lab
uggaguccuuggcggcgucauaugg

SEQ ID NO: 5258 - RNA, 25 nt, Artificial Sequence
  Made in the lab
uagcgcaggucuucggcagugaaca

SEQ ID NO: 5259 - RNA, 25 nt, Artificial Sequence
  Made in the lab
uaaccaucauauauaucaucagccc

SEQ ID NO: 5260 - RNA, 25 nt, Artificial Sequence
  Made in the lab
uuauaaugcagugucaucaucuucc

SEQ ID NO: 5261 - RNA, 25 nt, Artificial Sequence
  Made in the lab
auagcucccaauuugagguacuugg

SEQ ID NO: 5262 - RNA, 25 nt, Artificial Sequence
  Made in the lab
aauucugguuagcagaagauaaagg

SEQ ID NO: 5263 - RNA, 25 nt, Artificial Sequence
  Made in the lab
auaucccguggaccgauaauuuccg

SEQ ID NO: 5264 - RNA, 25 nt, Artificial Sequence
  Made in the lab
aagggagccacuuugcucuugaugg

SEQ ID NO: 5265 - RNA, 25 nt, Artificial Sequence
  Made in the lab
aaucuuggaaaucuccuucuuucuc

SEQ ID NO: 5266 - RNA, 25 nt, Artificial Sequence
  Made in the lab
caauaaugguguucaaucugugugc

SEQ ID NO: 5267 - RNA, 25 nt, Artificial Sequence
  Made in the lab
aaauaguuaaggucgagggcugucc

SEQ ID NO: 5268 - RNA, 25 nt, Artificial Sequence
  Made in the lab
uaagauggcaacaacggguccucca

SEQ ID NO: 5269 - RNA, 25 nt, Artificial Sequence
  Made in the lab
aaccucuuccauuagaaacaaacuc

SEQ ID NO: 5270 - RNA, 25 nt, Artificial Sequence
  Made in the lab
auucugagcugagaaugcauggagg

SEQ ID NO: 5271 - RNA, 25 nt, Artificial Sequence
  Made in the lab
uuagcuuccaaccacguguaaaucc

SEQ ID NO: 5272 - RNA, 25 nt, Artificial Sequence
  Made in the lab
aaacgaugagcuaucacaauggugg

SEQ ID NO: 5273 - RNA, 25 nt, Artificial Sequence
  Made in the lab
uugguacuaagcuuucugucuuggg

SEQ ID NO: 5274 - RNA, 25 nt, Artificial Sequence
  Made in the lab
uaauuauuccugucccaagauuugc

SEQ ID NO: 5275 - RNA, 25 nt, Artificial Sequence
  Made in the lab
uucaccaaaugugacauuuccuucc

SEQ ID NO: 5276 - RNA, 25 nt, Artificial Sequence
  Made in the lab
uggauagcgucuauaaugguuacgg

SEQ ID NO: 5277 - RNA, 25 nt, Artificial Sequence
  Made in the lab
uuugcugguaauugcguggaggacc

SEQ ID NO: 5278 - RNA, 25 nt, Artificial Sequence
  Made in the lab
uacuguggucgacgcccauaggguc

SEQ ID NO: 5279 - RNA, 25 nt, Artificial Sequence
  Made in the lab
caagguagaccagugaggcagaaua

SEQ ID NO: 5280 - RNA, 25 nt, Artificial Sequence
  Made in the lab
cagccuagagaggacggcaaugaag

SEQ ID NO: 5281 - RNA, 25 nt, Artificial Sequence
  Made in the lab
acgaucuguguauagugacagguau

SEQ ID NO: 5282 - RNA, 25 nt, Artificial Sequence
  Made in the lab
caagacuggcaugacuggaugaaua

SEQ ID NO: 5283 - RNA, 25 nt, Artificial Sequence
  Made in the lab
gcaaggcauuccucuugaauauuua

SEQ ID NO: 5284 - RNA, 25 nt, Artificial Sequence
  Made in the lab
gcguggcugucauaggcaucgacga

SEQ ID NO: 5285 - RNA, 25 nt, Artificial Sequence
  Made in the lab
gacaucauggaguucugcgaggcca

SEQ ID NO: 5286 - RNA, 25 nt, Artificial Sequence
  Made in the lab
gcacuggaugggaccuuccagagga

SEQ ID NO: 5287 - RNA, 25 nt, Artificial Sequence
  Made in the lab
gggaucgaauauuaacuccagagaa

SEQ ID NO: 5288 - RNA, 25 nt, Artificial Sequence
  Made in the lab
ggaagacgacaugccuggaauucuu

SEQ ID NO: 5289 - RNA, 25 nt, Artificial Sequence
  Made in the lab
ccugagacuuguuaccagagguuaa

SEQ ID NO: 5290 - RNA, 25 nt, Artificial Sequence
  Made in the lab
ccucaugagagagguaaacaccuuu

SEQ ID NO: 5291 - RNA, 25 nt, Artificial Sequence
  Made in the lab
ccugcacugcccaaagucuuggaaa

SEQ ID NO: 5292 - RNA, 25 nt, Artificial Sequence
  Made in the lab
gccaggaagccaguacagaucuuug

SEQ ID NO: 5293 - RNA, 25 nt, Artificial Sequence
  Made in the lab
gaguugugaaaggccugcaagaagu

SEQ ID NO: 5294 - RNA, 25 nt, Artificial Sequence
  Made in the lab
uggaaacuguugagguucuucagaa

SEQ ID NO: 5295 - RNA, 25 nt, Artificial Sequence
  Made in the lab
gcuguugcagcuagcagaugcuuua

SEQ ID NO: 5296 - RNA, 25 nt, Artificial Sequence
  Made in the lab
gcuagcauuaugugcaguuacaaua

SEQ ID NO: 5297 - RNA, 25 nt, Artificial Sequence
  Made in the lab
gccacugaagagggacccauuaaua

SEQ ID NO: 5298 - RNA, 25 nt, Artificial Sequence
  Made in the lab
ggcuacaaagcugcuuucauuggaa

SEQ ID NO: 5299 - RNA, 25 nt, Artificial Sequence
  Made in the lab
gccaagucugugacuugcacguacu

SEQ ID NO: 5300 - RNA, 25 nt, Artificial Sequence
  Made in the lab
ccgcaacaacgccaucuaugagaaa

SEQ ID NO: 5301 - RNA, 25 nt, Artificial Sequence
  Made in the lab
agcagagggaauucaucucucaggc

SEQ ID NO: 5302 - RNA, 25 nt, Artificial Sequence
  Made in the lab
gggaaaugucuccucccauugauuu

SEQ ID NO: 5303 - RNA, 25 nt, Artificial Sequence
  Made in the lab
uguaccagguguuugaacaucaggc

SEQ ID NO: 5304 - RNA, 25 nt, Artificial Sequence
  Made in the lab
aauucaucccaaugagcuucacagg

SEQ ID NO: 5305 - RNA, 25 nt, Artificial Sequence
  Made in the lab
uuauacaucugccagauaucauggu

SEQ ID NO: 5306 - DNA, 24 bp, Artificial Sequence
  Made in the lab
tgtccaggtgtttgaacatcaggc

SEQ ID NO: 5307 - DNA, 25 bp, Artificial Sequence
  Made in the lab
aattcatcccaatgagcttcacagg

SEQ ID NO: 5308 - DNA, 25 bp, Artificial Sequence
  Made in the lab
ttatacatctgccagatatcatggt
